United States Patent Application Publication US 2023/0272434 A1 - sequence listing, part 19

SEQ ID NO: 31915 - protein, 1350 aa, Lymantria dispar
METDNNETRIRPLPRGYRLGTSGADAGPGSMRTVSGSLLNRRAGVGRTEDVTADQRGGEGADDALQSRASPTDSVGSSASTTIDNEDRRRKWSNKETEELLYCYFKARMAGPGYIRRLYTLFKDRNPNNPKIRKFDGNKLSNQARRIIKQNVISQEIQDRIKRQAEGTLTLAPTSTVYASNDNEHTDTSPNVHAITTSTNTQQTHNSAEQAATIDELTSNIEVNEDQDPLILQFLQILAETKETTLADRLFLPKAKINKQFIDNLHTINKYIPNLLITNTDLISINHIIYATAKTLIINNNQTPFMPKNTIKPKTDPPWKKRIANKIEKFRNELGQLIEVKRGITTRRMINIKNKLYEKYNIKNENDHNNTAETIKQKIKALAARIKRYEEMSGRKEHNQLFAENEHKLYRSLVNNNNTDIKLPTKEGIEEFWTSILSKPTKYNTQANWIKEVEESTNTIDTTNIEEITIEQVKIAVRKLLNWKTPGVDKIQNYYLKYLTSTHKYLSLLFTKIITGQETLEEWFTTGQVILIPKNSNTEEPKNWRPIACLPSIYKLLTSVLADILYSHCDSNNIMAIEQRGCRRGARGCKDHLMVNKAILEDAHQAQKNLSMAWIDYQKAFDTVSHEWLLKVLDIYKCPPVIKSFLKWSMPAWKVIMTARGSHESITTEPIYIKRGIFQGDSLSPLLFCLAINPISFILNKYELKGYKLKDSFWINHLVYMDDLKIYANNKSNLKVLLDSVEIFTSDIGMRSGLDKCNVIHIRAGHRSTVTGEGHILLSQEKFKELEVGNSYKYLGIHESGKIEHSKIREQITKEYIKRVKKLIQTHLNARNIIKGINTYAIPVLLYSFGIINYKITDLKKIDMKTRKLLAIKKAHQQKAEVERLYLPIAQGGRGLINIEYMYKTQIVKYKQYLKTEFDDMIKAIVQHDINRDKYSIIKEAREIEQELHLPRDNLHTDIEIKQAIVKTQNTSWRAKQLHGQFPKKVLDQANINTELSFKWINKQHISPGIVSAVFAIQDQAVMTLQHQRDILRTAVDGKCRLCRVKDETAQHIISGCEKLAGTYYVKRHNNLVQYVYWCLAKKHKIEVSPLWWKETMIQPQVKENDTTKIMWETPVQTDITVTHNRPDLIYIDKINNKTFLFDISVPSDYNIGAKEIEKLSKYHLLKTEISRLWNTQTAVIPIVVGATGVVAKSINTYLEKLNTTIDITILQKQAAIHSTTIISKVLGDTVFVNNANTQEEPAQNEQQTLNTQHSENTQLTCCYTQDTNTTPDIPETVSGERGRRGNQTAHTQNTANTQITHTTQEESHTHRTDTQQTTHSNTRQGRTRGRGRRATSTTRTQHTRNRVGI

SEQ ID NO: 31916 - protein, 1304 aa, Heliothis virescens
MENNYNVERIGPLPEGDRRGTSGADAGRDSIRTVSGSLLNRRARVGGPESITADHRGGEGAGEVLQSRAALTHSAGSSASTTNTVINNDRRRKWSTEELHELMFCYFKARSGGTGYIERLLSLFKDRNPNNPKIHKFTGNTLSNQARSVIKQRLISQELLDRIQRQAEGTITIENPEITSHNENNQQDTPHTATHPTTDNTQHNLYTQHTPEQAEIIDELTNNVEVNEDQDTLIIHFLQVLAETKETPLAERLNLPKAHINKTFIGNLNTINNYLPNILVTHSSLCEINNVIYAAAKTLILNNNQTPFKSTDKIKPKSEPPWKRRIQTKIEKYRKELGQLIEIKREVNTRRMQKIKNKLYTKYNILSENDHDNTTEIIKQKVKALAGRIKRYDDINTKQEQNRLFKENEHRLYRSLGTKVNADVKIPSRESVEQFWESILSQPVQYNRDANWITEVEISSNEVTTVNEEQITEDQVKIAVGRLLNWKTPGIDKIQNYYLKYLTSSHRYLAQLFTNLVTGGETMEEWFTTGQVILIPKNDNTEDPKNWRPIACLPSMYKVLTSILANTLYHHCHENDIMAVEQRGCRRGARGCKDHLMVNKAILEDASHSQKNLSMAWIDYQKAFDSVSHEWLIKILDIYKCPAIIKKFLMISMPSWRVVMTARGSQNSITTKPIYIRRGIFQGDSLSPLLFCLAINPLSHVLNKYELKGYKLRDSYWINHLLYMDDLKVYANSRNNLKVLLDSVEIFTNDIGMRFGLDKCNVVHISSGQRSSTIGEGHVLLSGDIFKQLAVGESYKYLGIHESGKIEHSVIRDQITKEYFKRVKKLTNTHLTARNLIKGINTYAIPVLLYSFGIINYKISDLRKVDIKTRKLLAIKKAHQQKADVQRLYLPIAQGGRGLLNVEYIYKTQIIKYKHYLDTKSDYLLKAIVQHDKDRVKYSIIKETQEIETQLHLPRGNQHTDKEIKESIVKQQNLVWRSKPLHGQFPKKVLDQANVDKELSFKWLKKQQIAPRIESTVFAIQDQAVMTRQHQRDILKEPVDGKCRLCVTKDETTQHIISGCEKLAGTYYVRRHNNLVQYVYWCLAKKHKIEVSNLWWKETLVQPQVKENETAKIMWEMPVQTDVTVTHNRPDLIYINKTTNKTYLIDITVPSDYNIGPKEIEKLSKYHLLKTEISRLWNTQTTVIPIVIGVTGIVAKSIKKYIDQLDASIDIHILQKQAAIHSSTILSKVLGDTVFVRATEEQHSHTDTHTPDIPETQNTHPSPSTEAEPAIQEQSTQQSPNTEHPSSSRPRRGRRRTRAAQTNI

SEQ ID NO: 31917 - protein, 775 aa, Lymantria monacha
MSIEQRGCRRGARGCKDHLMVNKAILEDAHQSQKNLSMAWIDYQKAFDTVSHEWLLKVLDIYKCPPVIRRFLEWSMPAWKVIMTARGSQESITTEPIYIKRGIFQGDSLSPLLFCLAINPISFILNKYELKGYKLKDSFWINHLVYMDDLKIYANNKSNLKVLLDSVEIFTSDIGMRFGLDKCNVIHIRAGHRSTVSGEGHILLSQEKFKELQVGDSYKYLGIHESGKIEHNKIREQITKEYTKRVKKLIQTHLNARNIIKGINTYAIPVLLYSFGIINYKITDLKKIDTKTRKLLAIKKAHQQKAEVERLYLPITQGGRGLINVEYMYKSQIVKYKQYLKTEFDDMIKAIVQHDINKDKYSIIKESREIEQQLNLPQNNSHSDTEIKQAIVKTQNTSWRGKQLHGQFPKKVLDQANINTELSFKWIKKQHVSPGIVSAVFAIQDQAVMTLQHQRDILRAAVDGKCRLCRVKDETAQHIISGCEKLAGTYYVKRHNNLVQYVYWCLAKKHKIEVSPLWWKETMIQPQVKENDTTKIMWETPVQTDITVTHNRPDLIYIDKINNKTFLIDISVPSDYNIGAKEIEKLSKYHLLKTEISRLWNTQTAVIPIVVGATGVVAKSINTYLEKLGTTIDITILQKQAAIHSSTIISKVLGDTVFVDNTNTQQELAQNEQQASNTQQSENTQLTTNTQDTNITVDIPETVRGGRGRRSNQTAHIQNTANTQTTHTPEEESHTRRLDTQQTTNINTRQGRIRGRGPRATSTTRTHHTRNRVGI

SEQ ID NO: 31918 - protein, 1450 aa, Idaea aversata
MATQNNMERQNRSKRITPLPGGYRRDTSVAGGGRVAGLASDSPLSRRAGVGVTDERDALGTTADNFEGDILRSGDVSPTSSAGTPHPTTIRLESDQERRKWSTEELHELVYCFYKARALGPGYIKRLESIFRARNPNNPKSFAFTGNTLSGQARSVIARKVIPIDTLNSIKSRAEEDTSRVTTPSIPNSDNQTPEDTHTTEITPTKDSDPNISNTQHQTHSRASPTTIAEDLEPPPNTSETIGDDRRRKWSNAEMEELMFCYYKARVEGSGYMNRLQRIFIERNPRNPKVNRFNGQSLSTQARTIIKHKMLSQEVLNRIQQDAEVTEHIEDTEPINHTPTDTQSTQNLPQVDNQTSDTIQTYTPEQAQIIDQVTQNILDSENQDPIILQLLNILSETKETPISERKLLPKAKINKQFIGNCQKLNKFLPNLLEFNTSLREINDIIYATAKTLIVNNNQMPYEPRNTVKPKTNPAWKKRIQKKIENFRKELGKLIEIGRGVSSRRMIRTRDYLYSKYNIHNENDHSNTVEFLKQKVKALAGRIKRYEELNDRKEQNKLFRENEHRLYRSLGNNSYLSDIKIPSKDSVEQFWGSILSNPIQYNTDARWIKEIEESVDKVNTVESEEITVLEVKFAIRKLHNWKSPGIDKVQNYYLKYLNSTHKYLAKLYTKIVQGSEHLEDWFTTGQVILIPKNSNTEDPKNWRPIACLPSMYKLLTSVLANVLYSHCSNNNIMAAEQRGCRRGARGCKDHLMVNKAILEDAHTSQKNLSMAWIDYQKAFDSVSHAWLLKILDVYQCPPMVKKFLEMSMPNWKVVMTARGTHESITTEPIYIRRGIFQGDSLSPLLFCLAMNPLSLILNKYEHKGYKLKDSYFINHLLYMDDLKLYANNRSNLKVLLDSVEVFTADIGMRFGLDKCSVLHLSLGHRSSTTGEGHVLLNGEEFNELEVGNTYKYLGVSESGKIEHSAVREQVTKEYFKRVKKLLNSHLNSRNIIKGINTYAIPVLMYSFGIINYKNSDLKKIDTKTRKLLNIKKAHQQKADVERLYLPVTQGGRGLLNVENIYKTQIIKYKQYLRIEQDHLIKTIVQHDINKDKYSIIKEAEVIETELQLEIDNRHTDREIKEAIIKKQNERWRNKQLHGQFAKVVLDQANVDIEQSFRWIKKQQVSPSIESSIFAIQDQAVMTRQHQRDILKESVDGKCRLCAVKDETAQHIISGCEKLAGTYYVKRHNNLVQYVYWCLARKHNMDVNKLWWKETLTQPKVVENDTAKIMWEIPIQTDTTVSHNRPDLVYTDKTSNNTYLIDITVPSDYNIGAKEVEKLSKYHLLKTELKRIWNTTTHVIPIVIGSTGIIAKSLTRYIEKLDSKIDITILQKQAAIHTTIILSKVLGDTVFVNSNANTDQIEPNHSHSITQISSDTQALNTQSTHNNTQTLNTQSTHNTQSTIGRRRIRLQL

SEQ ID NO: 31919 - protein, 1372 aa, Lymantria dispar
METDNNETRIGPLPRGYRLGTSGADAGRGSMRTVSGSLLNRRAGVGRTEDVTADQRGGEGADDALQSRASPTDSVGSSASTTIGNEDRRRKWSNKETEELLYCYFKARMAGPGYIRKLYTLFKDRNPNNPKVRKFDGNKLSNQARRIIKQNVISQEIQDRIKRQAEGTLTLAPTSTVYASNDNEHSDTSPIIHAITTSKSYASNDNEHTDTSPNIHAITTSTNTQQTHNSAEQAATIDELTSNIEVNEDQDPLIIQFLQILAETKETTLADRLFLPKAKINKQFIDNLHTINKYIPNLLITNNDLISINHIIYATAKTLIINNNQTPFMPKNTIKPKTNPPWKKRIANKIEKLRKELGQLIEVKRGITTRRMINIKNKLYEKYNIKNENDHNNTAETIKQKIKALAARIKRYEEMSGRKEHNQLFAENEHKLYRSLGNNNNTDIKLPTKEGIEEFWTSILSKPIKYNTQANWIKEVEESTNTIDTTNIEEITIEQVKTAVRKLLNWKTPGVDKIQNYYLKYLTSTHKYLSLLFTKIITGQETLEEWFTTGQVILIPKNSNTEEPKNWRPIACLPSIYKLLTSALADILYNHCDSNNIMAIEQRGCRRGARGCKDHLMVNKAILEDAHQAQKNLSMAWIDYQKAFDTVSHEWLLKVLDIYKCPPVIKSFLKWSMPAWKVIMTARGSHESITTEPIYIKRGIFQGDSLSPLLFCLAINPISFILNKYELKGYKLKDSFWINHLVYMDDLKIYANNKSNLKVLLDSVEIFTSDIGMRFGLDKCNVIHIRAGHRSAVTGEGHILLSQEKFKELEVGNSYKYLGIHESGKIEHSKIREQITKEYIKRVKKLIQTHLNARNIIKGINTYAIPVLLYSFGIINYKITDLKKIDTKTRKLLAIKKAHQQKAEVERLYLPIAQGGRGLINIEYMYKTQIVKYKQYLKTEFDDMIKAIVQHDINRDKYSIIKEAREIEQELHLPQDNLHTDTEIKQAIVKTQNTSWRAKQLHGQFPKKVLDQANINTELSFKWINKQHISPGIVSAVFAIQDQAVMTSQHERDILRTAVDGKCRLCRVKDETAQHIISGCEKLAGTYYVKRHNNLVQYVYWCLAKKHKIEVSPLWWKETMIQPQVKENDTTKIMWETPVQTDITVTHNRPDLIYIDKINNKTFLIDISVPSDYNIGAKEIEKLSKYHLLKTEISRLWNTQTAVIPIVVGATGVVAKSINTYLEKLNTTIDITILQKQAAIHSTTIISKVLGDTVFVNNANTQEEPAQNEQQTLNTQHSENTQLTADTQDTNTTPDIPETVSGGRGRRGNQTAHTQNTANTQISHTTQEESHTHRTDTQQTTHPNTRQGRTRGRGRRATPTTRTQHTRNRVGI

SEQ ID NO: 31920 - protein, 1342 aa, Lymantria dispar
MRTVSGSLLNRRAGVGRTEDVTADQRGGEGVDDALQSRASPTDSVGSSASTTIGNEDRRRKWSNKETEELLYCYFKARMAGPGYIRKLYTLFKDRNPNSPKVRKFDGNKLSNQARRIIKQNVISQEIQDRIKRQAEGTLTLAPTSTVYASNDNEHSDTSLNIHAITTSTSYASNDNEHTDTSPNVHAITTSTNMQQTHNSDEQAAIIDELTSNIEVNEDQDPLILQFLQILAETKETTIADRLFLPKAKINKQFIDNLHTINKYIPNLLITNNDLISINHIIYATAKTLIINNNQTPFMPKNTIKPKTDPPWKKRIANKIEKLRKELGQLIEVKRGITTRRMINIKNKLYEKYNIKNENDHNNTAETIKQKIKALAARIKRYEEMSGRKEHNQLFAENEHKLYRSLGNNNNTDIKLPTKEGIEEFWTSILSKPTKYNTQANWIKEVEESTNTIDTTNIEEITIEQVKTAVRKLLNCKTPGVDKIQNYYLKYLTSTHKYLSLLFTKIITGQETLEEWFTTGQVILIPKNSNTEEPKNWRPIACLPSIYKLLTSVLADILYSHCDSNNIMAIEQRGCRRGARGCKDHLMVNKAILEDAHQAQKNLSMAWIDYQKAFDTVSHEWLLKVLDIYKCPPVIKGFLKWSMPAWKVIMTARGSHESITTEPIYIKRGIFQGDSLSPLLFCLAINPISFILIKYELKGYKLKDSFWINHLVYMDDLKIYANNKSNLKVLLDSVEIFTSDIGMRFGLDKCNVIHIRAGHRSTVTGEGHILLSQEKFKELEVGNSYKYLGIHESGKIEHSKIREQITKEYIKRVKKLIQTHLNARNIIKGINTYAIPVLLYSFGIINYKIIDLKKIDTKTRKLLAIKKAHQQKAEVERLYLPIAQGGRGLINIEYMYKTQIVKYKQYLKTEFDDMIKAKVQHDINRDKYSIIKEAREIEQELHLPQDNLHTDTEIKQAIVKTQNTSWRAKQLHGQFPKKVLDQANINTELSFKWINKQHISPGIVSVVFAIQDQAVMTLQHQRDILRTAVDGKCRLCRVKDETAQHIISGCEKLAGTYYVKRHNNLVQYVYWCLAKKHKIEVSPLWWKETMIQPQVKENDTTKIMWETPVQTDITVTHNRPDLIYIDKINNKTFLIDISVPTDYNIGAKEIEKLSKYHLLKTEISRLWNTQTAVIPIVVGATGVVAKSINTYLEKLNTTIDITILQKQAAIHSTTIISKVLGDTVFVNNANTQEEPAQNEQQTLNTQHSENTQLTANTQDTNTTPDIPETVSGERGRRGNQTAHTQNTANTQITHTTQEESHTHRTDTQQTTHPNTRQGRTRGRGRRATPTTRTQHTRNRVGI

SEQ ID NO: 31921 - protein, 1300 aa, Ochropleura plecta
MERQRNSTRIGPLPGGERRGTSGADAGRDSIRTVSGSLLNRRARVGGPEDTTAEQGDGVDTDDALRSRASTPIENSAGSSRETIQDSNEDRRRKWSTEELRELMYCFFKAQSQGPGYINRLFTLFTDRNPTNPKIHKFNGNTLSNQARRVIKQNVLSQELLNCIRDEAEGRVTETTEITNSMTGPNSTTDAPIIQRDLHTNTQHETNTNTQHSLEQAELIDQLTRNVTVTEDQDPLILSFLQVLAETKETPIKDRYLLPKAKINRHFVQNLHALNSYLPNLLITTDTLRELNNIIYAAAKTLILNNKQIPFIPKNVIKPISDPPWKKRIKNKIDKYRKELGQLIEIGRGVNTRRMNNIKTKLYNKYNIKSENERNNTEEILKQKIKALAGRIKRFEEISNRKEQNRLFNENEHRLYRSLGNNSTTFDIKLPSKESVEEFWKSILSKPIQYNKDAKWIEELEITSDKINTAELQEITVEQVKIAIRKLHNWKTPGIDKIHNYYLKYLTSTHQYLATAFTNIIEGKEQLEEWFTLGQVILIPKNENTENAQNWRPIACLPSIYKLLTSILANQLYDHCQENNIMAIEQRGCRRGARGCKDHLMVNKAILEDAHQSAKNLSMAWIDYQKAFDSVSHEWLLRILEIYRCPPIIKTFLEIAMPTWKVIMSARGTNEFLTTDPIYIKRGIFQGDSLSPLLFCLAINPISLILSKYEMKGYKLKDSFWINHLLNMDDLKIYANNNSNLKVLLDSVEIFTNDIGMSFGLNKCNTIQIRSGHVNNTTGEGHILISGDTFEQLGIDRTYKYLGIHESGKIEHSKIREQVTKVYFKRTKNLLNTHLSSRNIIKGINTYAVPVLLYSFGIINYKNSDLKAIDTKTRKLLAIKKAQKQKADVERLYLPIVEGGRGLINAENMYKTQILKYKQYLERENDDLIKVIVQHDKNRDKYSIIKEAQEIERELQLTQNNIHTDKEIKEAIVKKQKEKWRNKQLHGQFPKAVLDQTNIDKENSFKWLKKQQISPSIESAIFAIQDQAINTRQHQRDIFKVNIDGKCRLCVNKDETTQHIISGCEKLAGTYYVKRHNNLVQYVHWCLAKKHNIDVSSLWWKEALTQPQVKENEQAKIMWEIPIQTDVTVTHNRPDLIYVDKTKNLTFLIDIAVPSDYNIGAKEIEKLSKYHLLKTEIRRLWNTQTAVIPIVIGATGIISKSLHRYIDQLNTKIDVTILQKQAAIHTTIILSKVLGDNVYVHGTPRTQEPTPDTQHTVDSQQSSITQHLSSSRTPNTPMNSSATQSTTNTRRRRRRRDRYE

SEQ ID NO: 31922 - protein, 1349 aa, Lymantria monacha
METENNETRIGPLPGGDRRGTSGADAGRLSMRTVSGSLLNRRARVGRTEDATADQRGGEGADDALQSRASPTDSVGSSASTTIGNEDRRRKWSNEETEELLYCYFKARIAGPGYIRKLYTLFKDRNPNNPKIRKFDGNKLSNQARRIIKQNVISQEIQDRIKRQAEGTLTLPSTSTDYVSIDSEHADTAPNIHAITTTANTQQTHNSPEQAATIDELTSNIEVNEDQNPLILQFLQILAETTETTLADRLFLPKAKINKQFIDNLYTINKYIPNLLITNNGLISINNIIYATAKTLIINNNQRPFMPKNTIKPKTDPPWKKRIVNKIEKLRKELGQLIEIKRGTTTRRMINIKNKLYEKYNIKNENDHNNIAETIKQKIKALAARIKRYEEISGRKEQNQLFAENEHKLYRSLGNNNNSDIKLPTKEGIEEFWTSILSTPTKYNTKANWIKEVEETTNTIDTTNIEEITIEQVKTAIRKLLNWKTPGIDKIQNYYLKYLTSTHKYLSLLFTKIITGQEPLEEWFTTGQVILIPKNCNTAEPKNWRPIACLPNIYKLLTSVLADILYSHCDSNDIMSIEQRGCRRGARGCKDHLMVNKAILEDAHQSQKNLSMAWIDYQKAFDTVSHEWLLKVLDIYKCPPVIKRFLEWSMPAWKVIMTARGSQESITTEPIYIKRGIFQGDSLSPLLFCLAINPISFILNKYELKGYKLKDSFWINHLVYMDDLKIYANNKSNLKVLLDSVEIFTSDIGMRFGLDKCNVIHIRAGHRSTVSGEGHILLSQEKFKELQVGDSYKYLGIHESGKIEHSKIREQITKEYTKRVKKLIQTHLNARNIIKGINTYAIPVLLYSFGIINYKITDLKKIDTKTRKLLAIKKAHQQKAEVERLYLPITQGGRGLINVEYMYKSQIVKYKQYLKTEFDDMIKAIVQHDINKDKYSIIKESREIEQQLNLPQNNSHTDTEIKQAIVKTQNTSWRGKQLHGQFPKKVLDQANINTELSFKWIKKQHVSPGIVSAVFAIQDQAVMTLQHQRDILRAAVDGKCRLCRVKDETAQHIISGCEKLAGTYYVKRHNNLVQYVYWCLAKKHKIEVSPLWWKETMIQPQVKENDTTKIMWETPVQTDITVTHNRPDLIYIDKINNKTFLIDISVPSDYNIGAKEIEKLSKYHLLKTEISRLWNTQTAVIPIVVGATGVVAKSINTYLEKLGTTIDITILQKQAAIHSSTIISKVLGDTVFVNNTNTQQELAQNEQQASNTQQSENTQLTTNTQDTNITVDIPETVRGGRGRRSNQTAHTQNTANTQTTHTPEEESHTHRLDTQQTTNINTRQGRIRGRGPRATSTTRTHHTRNRVGI

SEQ ID NO: 31923 - protein, 1442 aa, Idaea aversata
MATQNNMERQNRSKRITPLPGGYRRDTSVAGGGRVAGLASDSPLSRRAGVGVTDERDALGTTADNFEGDILRSRDVSPTSSAGTPHPTTIRLESDQERRKWSTEELNELVYCFYKARALGPGYIKRLESIFRARNPNNPKSFAFTGNTLSGQARSVIARKVIPIDTLNSIKSRAEEDISRVTTPSIPNSDNQTPDDTHTTEITPTEDSDPNISNTQHQTHSRASPTTIAEDLEPPPNTSETIGDDRRRKWSNAEMEELMLCYYKARVGGSGYMNRLQRIFIERNPRNPKVNRFNGQSLSTQARTIIKHKMLSQEVLNRIQQDAEVTENIENTEPINHTPTDTQSTQNLPQVDNQTSDTIQTYTPEQAQIIDQVTQNILDSENQDPIILQLLNILSETKETPIPERKLLPKAKINKQFIGNCQKLNKFLPNLLEINTSLREINDIIYATAKTLIVNNNQMPYEPRNTVKPKTNPAWKKRIQKKIENFRKELGKLIEIGRGVSSRRMIRTRDYLYSKYNIHNENDHSNTVEFLKQKVKALAGRIKRYEELNDRKEQNKLFRENEHRLYRSLGSNSNSSDIKIPSKDSVEQFWGSILSNPIQYNTDARWIKEIEESVDEVNTVESEEITVLEVKFAIRKLHNWKSPGIDKVQNYYLKYLTSTHKYLAKLYTKIVQGSEHLEDWFTTGQVILIPKNSDTENPKNWRPIACLPSMYKLLTSVLANVLYSHCSNNNIMAAEQRGCRRGARGCKDHLMVNKAILEDAHTSQKNLSMAWVDYQKAFDSVSHAWLLKILDVYQCPPMVKKFLEMSMPNWKVVMTARGTHESITTEPIYIRRGIFQGDSLSPLLFCLAMNPLSLILNKYEHKGYKLKDSYFINHLLYMDDLKLYANNRSNLKVLLDSVEVFTADIGMRFGLDKCSVLHLSLGHRSSTTGEGHVLLNGEELNELEVGNTYKYLGVSESGKIEHSAVREQVTKEYFKRVKKLLNSHLNSRNIIKGINTYAIPVLMYSFGIINYKNSDLKKIDTKTRKLLNIKKAHQQKADVERLYLPVTQGGRGLLNVENIYKTQIIKYKQYLRIEQDHLIKTIVQHDINKDKYSIIKEAEVIETELQLEIDNRHTDREIKEAIIKKQNERWRNKQLHGQFAKVVLDQANVDIEQSFRWIKKQQVSPSIESSIFAIQDQAVMTRQHQRDILKESVDGKCRLCAVKDETAQHIISGCEKLAGTYYVKRHNNLVQYVYWCLARKHNMDVNKLWWKETLTQPKVVENDTAKIMWEIPIQTDTTVSHNRPDLIYIDKTSNNTYLIDITVPSDYNIGAKEVEKLSKYHLLKTELKRIWNTTTHVIPVVIGSTGIIAKSLTRYIEKLDSKIDITILQKQAAIHTTIILSKVLGDTVFVNSNANTDQIEPSDSHPTPIFTQTPSDTQALNTQSTHNNTQSTIGRRRIRLQL

SEQ ID NO: 31924 - protein, 1442 aa, Idaea aversata
MATQNNMERQNRSKRITPLPGGYRRDTSVAGGGRVAGLASDSPLSRRAGVGVTDERNALGTTADNFEGDILRSRDVSPTSSAGTPHPTTIRLESDQERRKWSTEELHELVYCFYKARALGPGYIKRLESIFRARNPNNPKSFAFTGNTLSGQARSVIARKVIPIDTLNSIKSRAEEHTSRVTTPSIPNSDNQTPDDTHTTEITPTEDSDPNISNTQHQTHSRASPTTIAEDLEPPPNTSETIGDDRRRKWSNAEMEELMLCYYKARVGGSGYMNRLQRIFIERNPRNPKVNRFNGQSLSTQARTILKHKMLSQEVLNRIQQDAEVTENIENTEPINHTPTDTQSTQNLPQVDNQTSDTIQTYTPEQAQIIDQVTQNILDSENQDPIILQLLNILSETKETPISERKLLPKAKINKQFIGNCQKLNKFLPNLLEINLSLREINDIIYATAKTLIVNNNQMPYEPRNTVKPKTNPAWKKRIQKKIENFRKELGKLIEIGRGVSSRRMIRTRDYLYSKYNIHNENDHSNTVELLKQKVKALAGRIKRYEELNDRKEQNKLFRENEHRLYRSLGNNSNLSDIKIPSKDSVEQFWGSILSNPIQYNTDARWIKEIEKSVDEVNTVESEEITVLEVKFAIRKLHNWKSPGIDKVQNYYLKYLTSTHKYLAKLYTKIVQGSEHLEDWFTTGQVILIPKNSDTENPKNWRPIACLPSMYKLLTSVLANVLYSHCSNNNIMAAEQRGCRRGARGCKDHLMVNKAILEDAHTSQKNLSMAWIDYQKAFDSVSHAWLLKILDVYQCPPMVKKFLEMSMPNWKVIMTARGTHESITTEPIYIRRGIFQGDSLSPLLFCLAMNPLSLILNKYEHKGYKLKDSYFINHLLYMDDLKLYANNRSNLKVLLDSVEVFTADIGMRFGLDKCSVLHLSLGHRSSTTGEGHVLLNGEELNELEVGNTYKYLGVSESGKIEHSAVREQVTKEYFKRVKKLLNSHLNSRNIIKGINTYAIPVLMYSFGIINYKNSDLKKIDTKTRKLLNIKKAHQQKADVERLYLPVTQGGRGLLNVENIYKTQIIKYKQYLRIEQDHLIKTIVQHDINKDKYSIIKEAEVIETELQLEIDNRHTDREIKEAIIKKQNERWRNKQLHGQFAKVVLDQANVDIEQSFRWIKKQQVSPSIESSIFAIQDQAVMTRQHQRDILKESVDGKCRLCAVKDETAQHIISGCEKLAGTYYVKRHNNLVQYVYWCLARKHNMDVNKLWWKETLTQPKVVENDTAKIMWEIPIQTDTTVSHNRPDLIYIDKTSNNTYLIDITVPSDYNIGAKEVEKLSKYHLLKTELKRIWNTTTHVIPVVIGSTGIIAKSLTRYIEKLDSKIDITILQKQAAIHTTIILSKVLGDTVFVNSNANTDQIEPSDSHPTPIFTQTPSDTQALNTQSTHNNTQSTIGRRRIRLQL

SEQ ID NO: 31925 - protein, 1372 aa, Lymantria dispar
METDNNETRIGPLPRGYRLGTSGADAGRGSMRTVSGSLLNRRAGVGRTEDVTADQRGGEGADDALQSRASPTDSVGSSASTTICNEDRRRKWSNKETEELLYCYFKARMAGPGYIRKLYTLFKDRNPNNPKVRKFDGNKLSNQARRIIKQNVISQEIQDRIKRQAEGTLTLAPTSTVYASNDNEHSDTSPIIHAITTSKSYASNDNEHTDTSPNIHAITTSTNTQQTHNSAEQAATIDELTSNIEVNEDQDPLIIQFLQILAETKETTLADRLFLPKAKINKQFIDNLHTINKYIPNLLITNNDLISINHIIYATAKTLIINNNQTPFMPKNTIKPKTNPPWKKRIANKIEKLRKELGQLIEVKRGITTRRMINIKNKLYEKYNIKNENDHNNTAETIKQKIKALAARIKRYEEMSGRKEHNQLFAENEHKLYRSLGNNNNTDIKLPTKEGIEEFWTSILSKPTKYNTQANWIKEVEESTNTIDTTNIEEITIEQVKTAVRKLLNWKTPGVDKIQNYYLKYLTSTHKYLSLLFTKIITGQETLEEWFTTGQVILIPKNSNTEEPKNWRPIACLLSIYKLLTSVLADILYSHCDSNNIMAIEQRGCRRGARGCKDHLMVNKAILEDAHQAQKNLSMAWIDYQKAFDTVSHEWLLKVLDIYKCPPVIKSFLKWSMPAWKVIMTARGSHESITTEPIYIKRGIFQGDSLSPLLFCLAINPISFILNKYELKGYKLKDSFWINHLVYMDDLKIYANNKSNLKVLLDSVEIFTSDIGMRFGLDKCNVIHIRAGHRSAVTGEGHILLSQEKFKELEVGNSYKYLGIHESGKIEHSKIREQITKEYIKRVKKLIQTHLNARNIIKGINTYAIPVLLYSFGIINYKITDLKKIDTKTRKLLAIKKAHQQKAEVERLYLPIAQGGRGLINIEYMYKTQIVKYKQYLKTEFDDMIKAIVQHDINRDKYSIIKEAREIEQELHLPQDNLHTDTEIKQAIVKTQNTSWRAKQLHGQFPKKVLDQANINTELSFKWINKQHISPGIVSAVFAIQDQAVMTLQHQRDILRTAVDGKCRLCRVKDETAQHIISGCEKLAGTYYVKRHNNLVQYVYWCLAKKHKIEVSPLWWKETMIQPQVKENDTTKIMWETPVQTDITVTHNRPDLIYIDKINNKTFLIDISVPSDYNIGAKEIEKLSKYHLLKTEISRLWNTQTAVIPIVVGATGVVAKSINTYLEKLNTTIDITILQKQAAIHSTTIISKVLGDTVFVNNANTQEEPAQNEQQTLNTQHSENTQLTVDTQDTNTTPDIPETVSGGRGRRGNQTAHTQNTANTQISHTTQEESHTHRTDTQQTTHPNTRQGRTRGRGRRATPTTRTQHTRNRVGI

SEQ ID NO: 31926 - protein, 1253 aa, Maniola jurtina
METINNRKRIGPLPGGERRGTSGADAGRSSMQTVSDSLLSRRAGVGEPEDSTADQIRGGEGTGDALQNRASPTDSAGSTAMTTDENISDDKRRKWSIDELTELMFCYYKARADGSGYLARLQKLFTERNPNNPKIHKFNGNKLANQARTVLKHNIISKELLDRVQKQAEGVISTENPEPISNEEQIITPMQTHSTQQQQQNTHQVQHTQNTSEQAEIIDQLTRNIEVNEDQDPLIIQLLQTLAETKETPIEERLLLPKAKINKKFIDSLNLLNNYLPKLLITNNSLREVNNIIYASAKTLIVNNNQTPYASKNTVKPKSDPPWKKRIQSKIDKLRKELGQLVEIQRGVNTLRMVKIKDRLYTKYNIQSENDHSNTAEIIKQKIKALAGRIKRYVDMNNRKEQNKLFNVNEHRLYRSLGSNGKKDIKVPDKQGLEEFWTSILSNPIEYNYEANWIKEIEHASREVITTDIQEITENQVKSALKKLLNWKSPGLDKIQNYYLKYLTSVHKYLALLFTNIVSGAERLEEWFTTGQVILIPKNENTEDPKNWRPIACLPTMYKLLTSVLADVMYSHCKENNIMAVEQRGCRRGARGCKDHLMTNKSILEDAYQSQKNLSMAWIDYQKAFDSVSHEWLLKLLDIYKCPTTIKRFLQLTMPFWRVIMTARGSQDSITTEPIYIRRGIFQGDSLSPFLFCLAINPLSFILNKYEMKGYKLKDSVWINHLLYMDDLKIYANNTNNLKVLIDSVEIFTNDIGMRFGLDKCNILHISSGCRSNAIGEGHILLSGETFEQLELGQKYKYLGVQESGKIEHNAIREQITKEYFKRVKKLLNTHLNSRNLIKGINTYAIPILIYSFGIINYKNSDLKKIDVKTRKMLAMKKAHMQKADVERLYLPVTEGGRGLINVEFMYKSQIVKYKQYLNEESDYLIKAIVQHDTHRDKYSIMKEAQEIERELHLQQKNIHTNKEIKDAIIKRHNEAWRSKQLHGQFPKKVLDQANLYKELSFKWMKRQQISPSIEASIFAIQDQAVMTRQHQRDILKEPVDGKCRLCATKDETTQHIISGCEKLAGTYYVKRHNNLVQYVYWCLAKKHNFEVSNLWWKEILTQPQVIENATAKILWEMPVQTDVTVTHNRPDLIYIDKNKNRTFLIDITVPSDYNIGPKEIEKLSKYHLLKAEVSRLWNTQATVIPIVIGATGVVARSIRKYIDILDTNIDISILQKQAAIHTSIIISKVLGDTVFVHNTQPEQHTLRDNIAN

SEQ ID NO: 31927 - protein, 1262 aa, Urbanus sp.
MERQFRNRTLGPLPGGDRRGTSGADAGRDSMQTVSDSLLNRRARVGGPENTTAEQRGGEGTGDALQSRASPTDSAGSSVSTTNNTVSDDRRRKWSTEELQELMFCYFKARLDGPGYIDRLHRVFSERNPNNPKIHKFNGNTLSNQARRIIKQNVISQELLDRIQKQAEGRTDAIECPERNEVEEEEATVHSHITITPHTNHIEYTIEQIQTIDQLAQNIEVNEDQDPLILNFLQILSETRETAIEERQLLPKAKINKRFIENLCVLNTFLPNILATNNSLREINDIIYAVAKTLIVKNNQLPYTPKNTFKIKSDPPWKRRIQTKIERFRKELGQLIEIGRGINTRRMINIKDKLYRQYNIQTENDHSNVEEILKQKIKALAGRIKRYEDINGRKEQNSLFSENEHKLYRSLGGNSFKDIKLPDKEIVEEFWKSILSNPKHYNSQATWIKEVEESSSEVNTIDIEEISEEHIKQATKKLLNWKTPGIDKIQNYYLKYLTNVHSYLGSVFTKIVSRRETLEGWFTTGQVILIPKNEETEDPKNWRPIACLPTMYKLLSSVLSNILYDHCHQNNIIAIEQRGCRRGARGCKDHLMVNKAILEDAHQSQKNLSMAWIDYQKAFDSVPHEWLAKVLDVYKCPPIIKRFLEIVMPSWRVIMTARGSQNTLTTEPIYVKRGIFQGDSLSPLLFCLAINPLSFVLNKYEMKGYKLKDSLWINHLLYMDDLKIYANNRHNLKVLLDSVDIFTRDIGMRFGLDKCNTIHISSGHRSKVTGEGHILLEGETIKQLAIGDRYKYLGIHESGKIEHSVVRDQIVKEYFKRIKKLTNTYLNARNLIKGINTYAIPVLLYSFGVINYKNSDLKKIDTKTRKLLAMKKAHQQKAEVERLYLPISQGGRGLLNVEYMYKTQIVKYKQYLKAESDDLIKAIVEHDSRRNKYSIINEAQEIENQLHLTRGNTHTDKDIREAIVKRSKDIWRNKQLHGQFIKKVLDQANIDTELSFKWIKKQQISPTIESSIFAIQDQCIMTRQHRRDILKEPVDGKCRLCASKDETTQHIISGCEKLAGNYYVKRHNNLVQYVYWCLAKKHKIEVSSLWWKESLIQPQVKENETAKILWEMPVQTDVTITHNRPDLIYIDKINNKTYLIDVTVPSDYNIGPKEIEKLSKYHLLKNEVSRLWKTHATIIPIVIGATGIVGKNIKRYIDQLGTFIDITILQKQAAIHTSTILSKVLGDTVFVNNPQNHDPQNTQQPTHKLRLLRSETPKKNQI

SEQ ID NO: 31928 - protein, 1312 aa, Craniophora ligustri
MENLNNVERIGPLPGGDRRGTSGADAGRDSIRTVSGSLLNRRARVGEPEDVTAEQRGGEGTDGALQSRASPTNSVGSSITTTNNAVSDDRRRKWSTEEMEELMFCYFRARSGGPGYISRLHELFAQRNPNNPKIHKFNGNTLSNQARRIIKQNVISQQLLDQIEKQAENNVPIENSEPTFNEIEETDNSPIQIPYTQPITQRTHDTQYIQDTQHTPEQAAVIDNLTRNIVVDEDQDQLILNFLQILAETKETPLAERLLLPKAKINKNFLHNLHTLNKYLPNLLITHTSLREINNIIYATAKTLIINNNQKPYVPKTTLKPKGDPPWKKRIQLKIEKLRKELGQLIEIKIGANTRRMIAIKENLYTKYNIQNENDHNNVAETVKQKIKALAGRIRRYEDMNSKKEQNRLFNENEHRLYKSLGGGHSNKYIKIPRKESVEEFWTGILSNPVQYKTEAKWIKNTESFSNDINTIDIDEITENQIKLAIRKLLNWKTPGIDKIQNYYIKYLTSVHKYLALLFTNIVTGTETLEQWFTTGQVILIPKNDNTEDPKNWRPIACLPSMYKLLTSVLANILYSHCDENDIMAVEQRGCRRGARGCKDHLMVNKAILEDAHQSQKNLSMAWIDYQKAFDSVSHEWLLKILDIYKCPPMIKRFLQLAMPSWRVIMTARGSQESITTDPIYIRRGIFQGDSLSPLLFCLAINPLSFVLNKYELKGYKLKDSFWINHLLYMDDLKIYANNKSNLKVLLDSVEIFTGDIGMKFGLDKCNIIHISSGYRSSAIGEGHILLNGEMFKELAVGDRYKYLGVQESGTIEHSIIRDQITKEYFKRIKKLSNSHLNSRNLIKGINTYAIPVLLYSFGVINYKNRDLKKIDVKTRKLLAMKKAQQQKADVERLYLPVTQGGRGLLNIEYLYKTQILKYKQYLKAGNDHLIKAIVQHDTNRDTYSIMKEALQIETELHLTQNNIHTDKEIKEAVIKNQNTTWRNKQLHGQFPKKVLDQANVDKELSFKWIKKQQISPSVESSIFAIQDQAVMTRQHQRDILKAPVDGKCRLCASKDETTQHIISGCEKLAGTYYVKRHNNLVQYVYWCIARKHKIEVSDLWWKETLTQPQVKENESAKLLWEIPVQTDITVTHNRPDLIYTDKSNNKTFLIDVTVPSDYNIGAKEIEKLSKYHLLKTEISRLWNTKTTVIPIVIGATGIVAKTITKYIDQLDSNININILQKQAAIHTSIILSKVLGDTVFVHNNEEQHIRNTQPSPSTQRTNVTLQSSNSTDLINTTHTPNTQQSHNTQNPDTRRRRGRRRPAQTNNTDTQ

SEQ ID NO: 31929 - protein, 986 aa, Lymantria dispar
MKNDHNNTAETIKQKIKALAARIKRYEEMSGRKEHNQLFAENEHKLYRSLENNNNTDIKLPTKEGIEEFWTSILSKPTKYNTQANWIKEVEGSTNTIDTTNIEEITIEQVKTAVRKLLNWKTPGVNKIQNYYLKYLTSTHKYLSQLFTKIITGQETLEEWFTTSQVILIPKNSNIEEPKNWRPIACLPSIYKLLTSVLADILYSHCDSNNIMTIEQRGRRRGARGCKDHLMVNKAILEDAHQAQKNLSMAWIDYQKAFDTVSHEWLLKVLDIYKCPPVIKSFLKWSMPAWKVIMTARGSHESITTEPIYIKRGIFQGDSLSPLLFCLAINPISFILNKYELKGYKLKDSFWINHLVYMDDLKIYANNKSNLKVLLDSVEIFTSDIGMRFGLDKCNVIHIRVGHRSTVTGEGHILLSQEKFKEVEVGNSYKYFGIHESGKIEHSKIREQITKEYIKRVKKLIQTHLNARNIIKGINTYAIPVLLYSFGIINYKITDLKKIDTKTRKLLAIKKADQQKAEVERLYLPIAQGGRGLINIEYMYKTQIVKYKQYLKTEFDDMIKAIVQHDINRDKYSIIKEAREIEQELHLPQDNLHTDTEIKQAIVKTQNTSWRAKQLHGQFPKKVLDQANINTELSFKWINKQHISPGIVSAVFAIQDQAVMTLQHQRDILRTAVDGKCRLCRVKDETAQHIISGCEKLAGTFYVKRHNNLVQYVYWCLAKKHKIEVSPLWWKETMIQPQVKENDTTKIMWETPVQTDITVTHNRPDLIYIDKINNKTFLIDISVPSDYNIGAKEIEKLSKYHLLKTEISRLWNTQTAVIPIVVGATGVVAKSINTYLEKLNTTIDITILQKQAATHSTTIISKVLGDTVFVNNANTQEEPAQNEQQTLNTQHSENTQLTANTQDTNTTPDIPETVSGERGRRGNQTAHTQNTANTQITHTTQEESHTHRTDTQQTTHPNTRQGRTRGRGRRATPTTRTQHTRNRVGI

SEQ ID NO: 31930 - protein, 1253 aa, Polyctor polyctor
MPREGRTLETLRVRYTPMANGALVTFVNMKRQFRNRTLGPLPGGDRRGTSGADAGRDSMQTVSDSLLNRRARVGGPENTTADQLGGKGTDDVLQSRASPTNSVGSSVSTTNTVSDDKRRKWSTEEIQELMFCYFKARSEGAGYIDRLYKYFTERNPNNPKIHKFNGNTLSNQARRIIKQNVLSQELLGRIQKRAEGIIDIEENSEQDVVEEGEATTSSNNNITHNIHHIEYTADQIQTIDQLAQNIEVNENQDPLIINFLQILSETKEITIEDRQFLPKAKINKQFLQNMYKLNKFLPNILATNNSIREINNIIYAAAKTLIINNNQLPYSPKNTYKIKSDPPWKKRIQIKIEKFRKELGQMIELGRGVKTRRMTKIKDKLYRQYNIQNENEHKNIEETLKQKIKALAGRIKRYEDINNRKEQNNLFSENEHKLYRSLGGERFKDIKLPDKETVQEFWSSILSTPTKYNSNANWIKEVELSSSEVNTSDVEEITEENIKHAIKKLLNWKTPGIDKIQNYYLKYFTSVHSYLASIFTRIVSLEETLEQWFTTGQVILIPKNQQTEDPKNWRPIACLPTMYKLLTSVLSNILYAHCHQNNIIAIEQRGCRRGSRGCKDHLMVNKAVLEDAHQSQKNLSMAWIDYQKAFDSVPHEWLIKVLDVYKCPSMIKRFLELVMPLWRVTMTARGTQNSLTTEPIYVRRGIFQGDSLSPLLFCLAINPLSFVLNKYEMKGYKLKDSLWINHLLYMDDLKLYANNRNNLKVLLDSVEIFTTDIGMRFGLDKCNTIHINSGHRSKVTGEGHILLEGDVIKQLAIGDKYKYLGIHESGKIDHSMVRDQIVKEYFKRIKKLINTHLNSRNLIKGINTYAIPVLLYSFGVINYKNSDLKKIDTKTRKLLAIKKAHQQKAEVQRLYLPVTQGGRGLLNIEYMYKTQIVKYKQYLKSEGDDLIKTIVKHDEQRNKYSIVNEAQKIENELQLARGHIHTDKEIREAIVKRCKDIWRSKQLHGQFIKKVLDQANVDTELSFQWIKKQQISPSIESSIFAIQDQCIMTRQHKRDILKEPVDGKCRLCNCRDETTQHIISGCEKLAGNYYIKRHNNLVQYVYWCLAKKHKLEMSSLWWKEKLIQPQVKENETAKILWEMPVQTDVSITHNRPDLIYIDKTTNQTYLIDVTVPSDYNIGPKEIEKLSKYHLLKNEVSRLWKTQAIIIPIVVGATGIVGKSIKKYIEKLGTFIDVTILQKQAAIHSSTILSKVLG

SEQ ID NO: 31931 - protein, 948 aa, Ochropleura plecta
MNNIKTKLYNKYNIQSENERNNTEEILKQKIKALAGRIKRFEEISNRKEQNRLFNENEHRLYRSLGNNSTTFDIKLPSKESVEEFWKSILSKPIQYNKDAKWIEELEITSDKINTAELQEITVEQVKIAIRKLHNWKTPGIDKIHNYYLKYLTSTHQYLATAFTNIIEGKEQLEEWFTLGQVILIPKNENTENAQNWRPIACLPSIYKLLTSILANQLYDHCQENNIMAIEQRGCRRGARGCKDHLMVNKAILEDAHQSAKNLSMAWIDYQKAFDSVSHEWLLRILEIYRCPPIIKTFLEIAMPTWKVIMSARGTNEFLTTDPIYIKRGIFQGDSLSPLLFCLAINPISLILSKYEMKGYKLKDSFWINHLLYMDDLKIYANNNSNLKVLLDSVEIFTNDIGMSFGLNKCNTIQIRSGHVNNTTGEGHILISGDTFEQLGIDRTYKYLGIHESGKIEHSKIREQVTKEYFKRTKKLLNTHLSSRNIIKGINTYAVPVLLYSFGIINYKNSDLKAIDTKTRKLLAIKKAQKQKADVERLYLPIVEGGRGLINAENMYKTQILKYKQYLEKENDDLIKVIVQHDKNRDKYSIIKEAQEIERELQLTQNNIHTDKEIKEAIVKKQEEKWRNKQLHGQFPKAVLDQTNIDKENSFKWLKKQQISPFIESAIFAIQDQAINTRQHQRDIFKVNIDGKCRLCVNKDETTQHIISGCEKLAGTYYVKRHNNLVQYVHWCLAKKHNIDVSSLWWKEALTQPQVKENEQAKIMWEIPIQTDVTVTHNRPDLIYVDKTKNLTFLIDIAVPSDYNIGAKEIEKLSKYHLLKTEIRRLWNTQTAVIPIVIGATGIISKSLHRYIDQLNTKIDVTILQKQAAIHTTIILSKVLGDNVFVHGTPRTQEPTPDTQHTVELDSQQSSITQHLSSSRTPNTPMNSSATQSTTNIRRRRGRRDRYE

SEQ ID NO: 31932 - protein, 752 aa, Apodemia murphyi
MAIEQRGCRRGVRGCKDHLMINKAILEDSHQSQKNLSMAWIDYQKAFDSVSHEWLLRILDIYKCPPMIKAFLKIAMPTWKVIMTARGTQESLTTEPIYIKRGIFQGDSLSPLLFCLAINPVSYILSKYEMKGYKLKDSFWVNHLLYMDDLKVYANTRHNLKVLLDSIEIFTNDIGMRFGLSKCNTLHIRSGHRSNTSGDGHVLLSGDTFEQLGIDKTYKYLGIHESGKIEHIKIREQVTKEYFRRIKQLLNTHLNSRNIIKGINTYAIPVLLYSFGIINYKSSDLKTIDIKTRKLLAIKKAQQQKADIERLYLPIVVGGRGLINVENMYKMQILKYKQYLERENDDLIKVIVQHDKNRDKYSIFKEAKDIERELQMTPHNTHTDKEIKQAIVEKQKAKWRCKQLHGQFPKAVLDQANIDTENSFKWMRKQQISPSIESAIFAMQDQAVMTRQHQRDILKENTDGKCRLCASKDETTQHIISGCEKLAGTYYVKRHNSLVQYVHWCLAKKHNIEVSNLWWKESLTQPQIKENDQTKIMWEIPIQTDVTVTHNRPDLIYVDKSNNTTFLIDIAVPSDYNIGAKEIEKLSKYHLLKTEIRRLWNTQTKVIPIVVGATGVISKSLQRYIDQMNTKIDITILQKQAAIHTTTILSKVLGDTIFVNSTPNTLEPASETQQTSHIFTQQTLHAIATPQTLDTQITPNTQEHSTDTQQTSHTQTSQHSSDTQYSSNTLNTQNQTPNTQNITRTRRRARKR

SEQ ID NO: 31933 - protein, 946 aa, Ochropleura plecta
MNNIKTKLYNKYNIQSENERNNTEEILKQKIKALAGRIKRFEEISNRKEQNRLFNENEHRLYRSLGNNSTTYDIKLPSKESVEEFWKSILSKPIQYNKDAKWIEELEITSDKINTAELQEITVEQVKIAIRKLHNWKTPGIDKIHNYYLKYLTSTHQYLATAFTNIIEGKEQLEEWFTLGQVILIPKNENTENAQNWRPIACLPSIYKLLTSILANQLYDHCQENNIMAIEQRGCRRGARGCKDHLMVNKAILEDAHQSAKNLSMAWIDYQKAFDSVSHEWLLRILEIYRCPPIIKTFLEIAMPTWKVIMSARGTNEFLTTDPIYIKRGIFQGDSLSPLLFCLAINPISLILSKYEMKGYKLKDSFWINHLLYMDDLKIYANNNSNLKVLLDSVEIFTNDIGMSFGLNKCNTIQIRSGHVNNTTGEGHILISGDTFEQLGIDRTYKYLGIHESGKIEHSKIREQVTKEYFKRTKKLLNTHLSSRNIIKGINTYAVPVLLYSFGIINYKNSDLKAIDTKTRKLLAIKKAQKQKADVERLYLPIVEGGRGLINAENMYKTQILKYKQYLERENDDLIKVIVQHDKNRDKYSIIKEAQEIERELQLTQNNIHTDKEIKEAIVKKQKEKWRNKQLHGQFPKAVLDQTNIDKENSFKWLKKQQISPSIESAIFAIQDQAINTRQHQRDIFKVNIDGKCRLCVNKDETTQHIISGCEKLAGTYYVKRHNNLVQYVHWCLAKKHNIDVSSLWWKEALTQPQVKENEQAKIMWEIPIQTDVTVTHNRPDLIYVDKTKNLTFLIDIAVPSDYNIGAKEIEKLSKYHLLKTEIRRLWNTQTAVIPIVIGATGIISKSLQRYIDQLNTKIDITVLQKQAAIHTTIILSKVLGDTVFVHGTPRTQEPTTDTQHTVDSQQSSITQHLSSSRTPNTPMNSSTTQSTTNIRRRRGRRDRYE

SEQ ID NO: 31934 - protein, 1349 aa, Lymantria dispar
METDNNETRIGPLPRGDRLGTSGADAGRGSMRTVSGSLLNRRAGVGRTEDVTADQRDGEGADDALQSRASPTDSVGSSASTTIGNEDRRRKWSNKETEELLYCYFKARMAGPGYIRKLYTLFKDRNPNNPKVRKFDGNKLSNQARRIIKQNVISQEIQDRIKRQAEGTLTLAPTSTVYASNDNEHTDTSPNVHAITTSTNTQQTHNSAEQAATIDELTSNIEVNEDQDPLILQFLQIFAETKETTLADRLFLPKAKINKQFIDNLHTINKYIPNLLITNTDLISINNIIYATAKTLIINNNQTPFMPKNTIKPKTDPPWKKRIANKIEKLRKELGQFIEVKRGITTRRMINIKNKLYEKYNIKNENDHNNTAETIKQKIKALAARIKRYEEMSGRKEHNQLFAENEHKLYRSLGNNNNTDIKLPTKEGIEEFWTSILSKPTKYNTQANWIKEVEESTNTIDTTNIEEITIEQVKTAVRKLLNWKTPGVDKIQNYYLKYLTSTHKYLSLLFTKIITGQETLEEWFTTGQVILIPKNSNTEEPKNWRPIACLPSIYKLLTSVLADILYSHCDSNNIMAIEQRGCRRGARGCKDHLMVNKAILEDAHQAQKNLSMAWIDYQKAFDTVSHEWLLKVLDIYKCPSVIKSFLKWSMPAWKVIMTARGSHESITTEPIYIKRGIFQGDSLSPLLFCLAINPISFILNKYELKGYKLKDSFWLNHLVYMDDLKIYANNKSNLKVLLDSVEIFTSDIGMRFGLDKCNVIHIRAGHRSTVTGEGHILLSQEKFKELEVGNSYKYLGIHESGKIEHSKIREQITKEYIKRVKKLIQTHLNARNIIKGINTYAIPVLLYSFGIINYKITDLKKIDTKTRKLLAIKKAHQQKAEVERLYLPIAQGGRGLINIEYMYKTQIVKYKQYLKTEFDDMIKAIVQHDINRDKYSIIKEAREIEQELHLPQDNLHTDTEIKQAIVKTQNTSWRAKQLHGQFPKKVLDQANINTELSFKWINKQHISPGIVSAVFAIQDQAVMTLQHQRDILRTAVDGKCRLCRVKDETAQHIISGCEKLAGTYYVKRHNNLVQYVYWCLAKKHKIEVSPLWWKETMIQPQVKENDTTKIMWETPVQTDITVTHNRPDLIYIDKINNKTFLIDISVPSDYNIGAKEIEKLSKYHLLKTEISRLWNTQTAVIPIVVGATGVVAKSINAYLEKLNTTIDITILQKQAAIHSTTIISKVLGDTVFVNNANTQEEPAQNEQQTLNTQHSENTQLTANTQDTNTTPDIPETVSGERGRRGNQKAHTQNTANTQITHTTQEESHTHRTDTQQTTHPNTRQGRTRGRGRRATPTTRTQHTRNRVGI

SEQ ID NO: 31935 - protein, 956 aa, Idaea aversata
MPYEPRNTVKPKTNPPWKKRIQKKIENFRKELGKLIEIGRGVSSRRMIRTRDYLYSKYNIHNENDHSNTVEFLKQKVKALAGRIKRYEELNDRKEQNKLFRENEHRLYRSLGSNSNSSDIKIPSKDSVEQFWGSILSNPIQYNTDARWIKEIEESVDEVNTLESEEITVLEVKFAIRKLHNWKSPGIDKVQNYYLKYLTSTHKYLAKLYTKIVQGSEHLEDWFTTGQVILIPKNSDTENPKNWRPIACLPSMYKLLTSVLANVLYSHCSNNNIMAAEQRGCRRGARGCKDHLMVNKAILEDAHTSQKNLSMAWIDYQKAFDSVSHAWLLKILDVYQCPPMVKKFLEMSMPNWKVVMTARGTHESITTEPIYIRRGIFQGDSLSPLLFCLAMNPLSLILNKYEHKGYKLKDSYFINHLLYMDDLKLYANNRSNLKVLLDSVEVFTADIGMRFGLDKCSVLHLSLGHRSSTTGEGHVLLNGEEFNELEVGNTYKYLGVSESGKIEHSAVREQVTKEYFKRVKKLLNSHLNSRNIIKGINTYAIPVLMYSFGIINYKNSDLKKIDTKTRKLLNIKKAHQQKADVERLYLPVTQGGRGLINVENIYKTQIIKYKQYLRIEQDHLIKTIVQHDINKDKYSIIKEAEVIETELQLEIDNRHTDREIKEAIIKKQNERWRNKQLHGQFAKVVLDQANVDIEQSFRWIKKQQVSPSIESSIFAIQDQAVMTRQHQRDILKEAVDGKCRLCAAKDETAQHIISGCEKLAGTYYVKRHNNLVQYVYWCLARKHNMDVNKLWWKETLTQPKVVENDTAKIMWEIPIQTDTTVSHNRPDLVYTDKTSNNTYLIDITVPSDYNIGAKEVEKLSKYHLLKTELKRIWNTTTHVIPIVIGSTGIIAKSLTRYIEKLDSKIDITILQKQAAIHTTIILSKVLGDTVFVNSNANTDQIEPNHTSSKHTTTHKL

SEQ ID NO: 31936 - protein, 1336 aa, Emesis brimo
MKRQRKSTRNGPLPGGERRGTFGAGAGRDSIRTVSGSLLNRRAGAGGPEDTTAEYRGGVGTDDALRSGASTPIEHTAGLSGETIENINDDRRRKWSIEEEKELMFCFFKAKSQGPGYISRLHMLFKDRNPNNPKIHRFNGNTLANQARRIIKQNVISQELLNRIKNEAEERVAVNTETISNTTETITSTNASITQHNSHTTYESNTNTQHTLNTDIQPLQETDIIDQFTQNVTVTEDQDPLILNFLQVLSDTKEISIKDRLSLPKAKINRHFIQNIQTLNNFLPNILITTHTLRDLNDIIYATAKTLILNNRQIPFVPKNLLKVASDPPWKKRIKLRIDKIRKELGQLIEIGRGVNTRRMINIKTKLYSKYNIQQDNDRSNTVEILMQKIKALAGRIKRYEESSQKKEQNMLFSENEHKLYRSLGKNNTAYDVKLPSKDNVEEFWKSILSNPIQYNTDAAWIEEIELLSNRINTEQSQDITEEQVKIAITKLHNWKTPGIDKIHNYYLKYLTSTHKYLAKVFSNIIGGQEEVEEWFTTGQVILIPKNENTQEAKNWRPIACLPSIYKLLTSVLANQLYDHCQRNNIMAIEQRGCRRGARGCKDHLMINKAILEDTHQSQKNLSMAWIDYQKAFDSVSHEWLLKILDIYKCPPMIKAFLKIAMPTWRVVMTARGTNEFLTTEPINIKRGIFQGDSLSPLLFCLAINPISYILNKYEMKGYKLKDSLWVNHLLYMDDLKVYANNKYNLKVLLDSIEIFTNDIGMTFGLSKCNIIHIRSGHRSNTSGDGHVLLSGEIFEQLGINTTYKYLGIHESGKIEHSKIREQVTKEYFRRVKQLLNTYLNSRNIIKGINTFAIPVLLYSFGIINYKNGDLKAIDIKTRKLLAIKKAHQQKSDIERLYLPINEGGRGLINIENMYKIQILKYKLYLEREYDELIKVIVQHDKNRDKYSIIKEAQEIERDLQITQNNIHTDKEIKQAIVDKQKARWRNKHLHGQFPKAVLDQANIDTESSFKWLKKQPVTPSVESAIFAIQDQAVMTRQHQRDILKLDIDGKCRLCASKDETTQHIISGCEKLAGSYYVNRHNNLVQYVHWCLARKHNIEVSNYWWKESLTQPQVKENEQAKIMWEIPIQTDVTVTHNRPDLIYVDKINNTTFLIDIAVPSDYNIGAKEIEKLSKYHLLKTEIRRLWNTKTSVIPVVVGATGIISKSIHKYIDQLNTKIDLTILQKQAAIHTAIILSKVMGDTVFTKTTSSTQAPATATATQQTPHAVVSQQTLDTQVSLTRTQQTLDTSTLDTQQTSLTRTSQTSATHHLPHNVNTHNHTLNSQTTSRTRIRKRRR

SEQ ID NO: 31937 - protein, 1264 aa, Astraptes apastus
MPREGRTLGTPRVRYAPMTNGALVTFVNMERQFRNRTLGPLPGGDRRGTSGADAGRDSMQTVSDSLLNRRARVGGPENTTAEPQGGEGTGDALQSRALPTDSVGSSVTTTNNTVSDDKRRKWSTEELQELMFCYFKARSNGPGYIDRLHGLFSERNPNNPKIHKFNGNTLSNQARRIIKQNVISQELLDRIQKHAEGSTDAVEPFEQNEIEEEEVVTIYPHITSTHNTNHVNYTIEQIRTIDQLAQNIEVNEDQDPLILNFLQILSETKETAMEERQLLPKAKINKHFIENLCNLNKFLPNILVTNNSLREINDLIYAAAKTLIINNNQLPYTPKNTFKIKSNPPWKKRIQTKIEKFRKELGQLIEIGRGINTRRMINIKDKLYRQYNIQNENEHSNIEEILKQKIKALAGRIKRYEDINSRKVQNNLFSENEHKLYRSLGANNFKDIKLPGKEIVEEFWASILSNPINYNSKATWIKEVEESSSEVNTIDIEEISEEHIKQAIKKLLNWKTPGIDKIQNYYLKYLTSVHSYLGSVFTKIVSRRETLEDWFTTGQVILIPKNEETEEPKNWRPIACLPTMYKLLSSVLSNILYDHCHQNNIIAIEQRGCRRGARGCKDHLMVNKAILEDAHQSQKNLSMAWIDYQKAFDSVPHEWLAKVLDVYKCPPIIKRFLEIVMPSWRVIMTARGSQNSLTTEPIYVKRGIFQGDSLSPLLFCLAINPLSFVLNKYEMKGYKLKDSLWINHLLYMDDLKLYANNKHNLKVLLDSVEIFTRDIGMKFGLEKCNTIHINSGHRGKVIGEGHILLEGEIIKQLAIGDRYKYLGIHESGKIEHSVIRDQITKEYYKRLKKLLNTYLNSRNIIKGINTYAIPVLLYSFGVINYKNSDLKKIDTKTRKLLAMKKVHQQKAEVERLYLPVAQGGRGLLNVEYMYKTQIVKYKQYLNTEMDDLIKAIVEHDSRRNKYSIINEAQEIENQLHLTQGNTHTDKDIRGAIIKKSKGIWRNKQLHGQFIKKVLDQANIDTELSFKWIKKQQISPSIESSIFAIQDQCIMTRQHRRDILKEPIDGKCRLCASKDETTQHIISGCEKLAGNYYVKRHNNLVQYVYWCLAKKHKIEVSSLWWKETLIQPQVKENETAKILWEMPVQTDITVTHNRPDLIYIDKINNKTYLIDVTVPSDYNIGPKEIEKLSKYHLLKNEVSRLWKTQTTIIPIVIGATGIVGKNIKKYIEKLDTFIDITILQKQAAIHTSTILSKVLGDTVFVNKSQ

SEQ ID NO: 31938 - protein, 1349 aa, Lymantria monacha
METENNETRIGPLPGGDRRGTSGADAGRLSMRTVSGSLLNRRARVGRTEDATADQRGGEGADDALQSRASPTDSVGSSASTTIGNEDRRRKWSNEETEELLYCYFKARIAGPGYIRKLYTLFKDRNPNNPKIRKFDGNKLSNQARRIIKQNVISQEIQDRIKRQAEGTLTLPSTSTDYVSIDSEHADTAPNIHAITTTANTQQTHYSPEQAATIDELTSNIEVNEDQNPLILQFLQILAETTETTLADRLFLPKAKINKQFIDNLHTINKYIPNLLITNNGLISINNIIYATAKTLIINNNQRPFMPKNTIKPKTDPPWKKRIVNKIEKLRKELGQLIEIKRGTTTRRMINIKNKLYEKYNIKNENDHNNIAETIKQKIKALAARIKRYEEISGRKEQNQLFAENEHKLYRSLGNNNNSDFKLPTKEGIEEFWTSILSTPTKYNTQANWIKEVEETTNTIDTTNIEEITIEQVKTAIRKLLNWKTPGIDKIQNYYLKYLTSTHKYLSLLFTKIITGQEPLEEWFTTGQVILIPKNCNTAEPKNWRPIACLPNIYKLLTSVLADILYSHCDSNDIMSIEQRGCRRGARGCKDHLMVNKAILEDAHQSQKNLSMAWIDYQKAFDTVSHEWLLKVLDIYKCPPVIKRFLEWSMPAWKVIMTARGSQESITTEPIYIKRGIFQGDSLSPLLFCLAINPISFILNKYELKGYKLKDSFWINHLVYMDDLKIYANNKSNLKVLLDSVEIFTSDIGMRFGLDKCNVIHIRAGHRSTVSGEGHILLSQEKFKELQVGDSYKYLGIHESGKIEHSKIREQITKEYTKRVKKLIQTHLNARNIIKGINTYAIPVLLYSFGIINYKITDLKKIDTKTRKLLAIKKAHQQKAEVERLYLPITQGGRGLINVEYMYKSQIVKYKQYLKTEFDDMIKAIVQHDINKDKYSIIKESREIEQQLNLPQNNSHTDTEIKQAIVKTQNTSWRGKQLHGQFPKKVLDQANINTELSFKWIKKQHVSPGIVSAVFAIQDQAVMTLQHQRDILRAAVDGKCRLCRVKDETAQHIISGCEKLAGTYYVKRHNNLVQYVYWCLAKKHKIEVSPLWWKETMIQPQVKENDTTKIMWETPVQTDITVTHNRPDLIYIDKINNKTFLIDISVPSDYNIGAKEIEKLSKYHLLKTEISRLWNTQTAVIPIVVGATGVVAKSINTYLEKLGTTIDITILQKQAAIHSSTIISKVLGDTVFVNNTNTQQELAQNGQQASNTQQSENTQLTTNTQDTNITVDIPETVRGGRGRRSNQTAHTQNTANTQTTHTPEEESHTHRLDTQQTTNINTRQGRIRGRGPRATSTTRTHHTRNRVGI

SEQ ID NO: 31939 - protein, 1450 aa, Idaea aversata
MATQNNMERQNRSKRITPLPGGYRRDTSVAGGGRVAGLASDSPLSRRAGVGVTDERDALGTTADNFEGDILRSRDVSPTSSAGTPHPTTIRLESDQERRKWSTEELNELVYCFYKARALGPGYIKRLESIFRARNPNNPKSFAFTGNTLSGQARSVIARKVIPIDTLNSIKSRAEEDISRVTTPSIPNSDNQTPDDTHTTEITPTEDSDPNISNTQHQTHSRASPTTIAEDLEPPPNTSETIGDDRRRKWSNAEMEELMLCYYKARVGGSGYMNRLQRIFIERNPRNPKVNRFNGQSLSTQARTIIKHKMLSQEVLNRIQQDAEVTENIENTEPINHTPTDTQSTQNLPQVDNQTSDTIQTYTPEQAQIIDQVTQNILDSENQDPIILQLLNILSETKETPIPERKLLPKAKINKQFIGNCQKLNKFLPNLLEINTSLREINDIIYATAKTLIVNNNQMPYEPRNTVKPKTNPAWKKRIQKKIENFRKELGKLIEIGRGVSSRRMIRTRDYLYSKYNIHNENDHSNTVEFLKQKVKALAGRIKRYEELNDRKEQNKLFRENEHRLYRSLGSNSNSSDIKIPSKDSVEQFWGSILSNPIQYNTDARWIKEIEESVDEVNTVESEEITVLEVKFAIRKLHNWKSPGIDKVQNYYLKYLTSTHKYLAKLYTKIVQGSEHLEDWFTTGQVILIPKNSDTENPKNWRPIACLPSMYKLLTSVLANVLYSHCSNNNIMAAEQRGCRRGARGCKDHLMVNKAILEDAHTSQKNLSMAWVDYQKAFDSVSHAWLLKILDVYQCPPMVKKFLEMSMPNWKVVMTARGTHESITTEPIYIRRGIFQGDSLSPLLFCLAMNPLSLILNKYEHKGYKLKDSYFINHLLYMDDLKLYANNRSNLKVLLDSVEVFTADIGMRFGLDKCSVLHLSLGHRSSTTGEGHVLLNGEEFNELEVGNTYKYLGVSESGKIEHSAVREQVTKEYFKRVKKLLNSHLNSRNIIKGINTYAIPVLMYSFGIINYKNSDLKKIDTKTRKLLNIKKAHQQKADVERLYLPVTQGGRGLLNVENIYKTQIIKYKQYLRIEQDHLIKTIVQHDINKDKYSIIKEAEVIETELQLEIDNRHTDREIKEAIIKKQNERWRNKQLHGQFAKVVLDQANVDIEQSFRWIKKQQVSPSIESSIFAIQDQAVMTRQHQRDILKESVDGKCRLCAVKDETAQHIISGCEKLAGTYYVKRHNNLVQYVYWCLARKHNMDVNKLWWKETLTQPKVVENDTAKIMWEIPIQTDTTVSHNRPDLVYTDKTSNNTYLIDITVPSDYNIGAKEVEKLSKYHLLKTELKRIWNTTTHVIPIVIGSTGIIAKSLTRYIEKLDSKIDITILQKQAAIHTTIILSKVLGDTVFVNSNANTDQIEPNHSHSITQISSDTQALNTQSTHNNTQTLNTQSTHNTQSTIGRRRIRLQL

SEQ ID NO: 31940 - protein, 1334 aa, Emesis progne
MKRQLKSTRNGPLPGGERRGTSGAGAGRDSIRTVSGSLLNRRAGAGGPENTTAEYRGGVGTDDALRSGASTPIEHTAGSSGETIENINDDRRRKWSIEEEEELMFCFFKAKSQGPGYISRLHMLFKDRNPNNPKIHKFNGNTLANQARRIIKQNVISQELLNRIKDKAEGRVAVNTEIISNTTETNTSTIASITQHNSHTTYESNTNTQHTLNTEIQPLQETDIIDQFTRNLTVTEDQDPLILHFLQVLSDTKETSIKDRLSLPKAKINRHFIQNIQTLNNFLPNILITTHTLRDLNDIIYATAKTLILNNRQIPFVPKNLLKVTSDPPWKKRIKLRIDKIRKELGQLIEIGRGVNTRRMINLKTKLYSKYNIQQDNDRSNTVEILMQKIKALAGRIKRYEESSQKKEQNRLFSENEHKLYRSLGKNNTAHDVKLPSKDSVEEFWKSILSNPIQYNTDAAWIEEIELLSNRINTEQSQNITEEQVKIAITKLHNWKTPGIDKIHNYYLKYLTSTHKYLAKVFSNIIGGQEEVEEWFTTGQVILIPKNENTQEAKNWRPIACLPSVYKLLTSVLANQLYDHCQRNNIMAIEQRGCRRGARGCKDHLMINKAILEDTHQSQKNLSMAWIDYQKAFDSVSHEWLLKILDIYKCPPMIKAFLKITMPTWKVVMTARGTNEFLTTEPINIKRGIFQGDSLSPLLFCLAINPISYILNKYEMKGYKLKDSLWVNHLLYMDDLKVYANNKYNLKVLLDSIEIFTNDIGMTFGLSKCSIIHIRSGHRSNTSGDGHVLLSGEIFEQLGIDTTYKYLGIHESGKIEHSKIREQVTKEYFRRVKQLLNTHLNSRNIIKGINTFAIPVLLYSFGIINYKNGDLKAIDIKTRKLLAIKKAQQQKSDIERLYLPINEGGRGLINIENMYKIQILKYKQYLEREYDELIKVIVQHDKNRDKYSIIKEAQEIERDLQITQNNIHTDKEIKQAIVDKQKTRWRNKHLHGQFPKAVLDQANIDTESSFKWIKKQPVTPSVESAIFAIQDQAVMTRQHQRDILKLDIDGKCRLCASKDETTQHIISGCEKLAGSYYVNRHNNLVQYVHWCLARKHNIEVSNFWWKESLTQPQVKENEQAKIMWEIPIQTDVTVTHNRPDLIYVDKINNTTFLIDIAVPSDYNIGAKEIEKLSKYHLLKTEIRRLWNTKTSVIPLVVGATGIISKSIHKYIDQLNTKIDLTILQKQAAIHTTIILSKVMGDTVFTKTTSSTQAPATATQQTPHAAVSQQTLDTQVSLTRTQQTLDTSTLDTQQTSLTRTSQTSDTHHLPHNVNTRNHTLNTQTTSWTRTRTRRR

SEQ ID NO: 31941 - protein, 1313 aa, Phalera bucephala
MERQLSNERLGPLPGGDRRGTSGADAGRDSMQTVSDSLLNRRVRVGGPENITADQRGGEGTDGALQSRASPTDSVGSSETTTHMELSDDRRRKWSTDELKELMFCYFKARAGGPGYIGRLQELFAERNLNNPKIHKFNGNTLSNQARRVIKQNVISQELLNCIQKQAEGIIKLQNIPSSEQNVNEVEEHNTMSLHNTISQNIQHIESYTVEQAETIDNFTQNIQVNEDQDPLILNFLQILAETKETSVEDRLLLPKAKINRLFLENLNKINTYLPHILITNNSLRDINDIIYAAAKTLIINNNQTPYIPKNTIKAKTDPPWKRRIQFKIDTYRKELGRLIEIERGTNTRRMMNIKDKLYRKHNIQSENDHRNIVEILKQKVKALAGRIKRYDNINSRKEQNNLFHENEHKFYRSLGGNNIKEVKLPNKERVEEFWSAILSIPVQYNNEARWIQEVEVSSNEVDTTDIHEISEDQIKFAVRKLLNWKSPGIDKIQNYYIKYFTSVHSYLASLFTKIVTQRETLEEWFTTGQVILIPKNEHTEDPKNWRPIACLPTMYKLLTSVLANILYKHCHENNIMAVEQRGCRRGFRGCKDHLMVNKAILEDAHQSQKNLSMAWIDYQKAFDSVSHEWLIKVLDVYKCPPMIKKFLQLVMPAWRVIMTARGSQNSLTTEPITIRRGIFQGDSLSPLLFCLAINPLSFVLNKYEMKGYKLKDSFWINHLLYMDDLKIYANNKHNLKVLLDSVEIFTSDIGMRFGLDKCNIIHISSGHRSSVTGEGHILLNGEMVNQLAVGDRYKYLGVHESGKIEHSIIKDQLCKEYFKRLKKLLNTHLNSRCLIKGVNTYAIPVLLYSFGVINYKSSDLQKIDTKTRKLLAIKKAHQQKADVQRLYLPVAQGGRGLLNVEYMYKAQIVKYKQYLEAESDHLIKAIVEHDIHRDKYSVINEAKEIEGQLYLGRGVMHTDKQIKEAILKKHNEIWRSKQLHGQFPKKVLDQANIDTELSFKWIKKQQISPTIESSIFAIQDQAILTRQHQRDILKEPIDGKCRLCACKDETTQHIISGCEKLAGTYYVKRHNNLVQYVYWCLAKKHKIEVSNLWWKETLIQPQVKENEYTKILWEMPVHTDITVTHNRPDLIYVDKVNNKTYLIDITVPSDYNIGAKEIEKLSKYHLLKTEVSRLWNTQTTVIPIVIGATGIVAKSIKKYIDKLDTCIDISILQKQAAIHTSTILSKVLGDTVFVNNTHDSHIPNTEQSSHTQQATHTQPIAHTQQTSITQQLPSTPETSNTSHTQNTQRPPNTRQRNRRGRRRATFHTQQTP

SEQ ID NO: 31942 - protein, 1270 aa, Arctia plantaginis
MSQPNNGEGRGADDALQSRVSPVDSVGSSTTTTNNAISDDRRRKWSTEELKELMFCYFKARSEGPGYIGRLQTLYTERNPNNDKIHKFNGNTLSNQARRVIKQNVISQELLDLIQKQAEGNIVTENPEHISHATQERHETPSSIHNTLQATKLPHTQYSSEQTEAIDQLTNNIEVNDDQDPLVLHYLQILAETKETPLTERLLLPKAKINKQFIQNLNTLDKFLPNLLVTNTSLREINNIIYAAAKTLILNNNQTPYTPTHTIKPKYDPPWKKRIRNKIEKFRKELGQLIEIERGISTRRMRNIKEKLYSKYNIQNENDHQNAAEILKQKIKALAGRIKRYDDINSRKEQNSLFRENEHRFYKTLGNRNTSKDIKIPSREGVEEFWTSILSKPSQYNTEAKWIKEVETLTSEVSTIDIEEIAEDEVKSAIRKLQNWKAPGIDKIQNYYLKYFTSIHPYLSLLFTNIVAGTEALEDWFTTGKVILIPKNEKTEEPKNWRPIACLPSIYKLLTSVLANILYSHCDQNNIMAVEQRGCRRGTRGCKDHLMVNKAILEDAHQTQKNLSMGWIDYQKAFDSVSHEWLLKILDVYKCPSIIKRFLKLVMPSWRVIMTARGSQDSITTEPITIKRGIFQGDSLSPLLFCLAINPLSFILNKYEMKGYKLKDSFWINHLIYMDDLKIYANNGSNLKILLDSVEIFTRDIGMSFGLDKCNVIHIRSGHRSSVRGEGHILLSGEKFQELAIGDRYKYLGIHESGKIEHSVIRDQITKEYFKRIKKLLKTHLNSRSIVKGINTYAIPVLLYSFGVINYKISDLKKIDVKTRKLLAMNKAHQQKSEVKRLYLPLTEGGRGLINVEYMYKTQVVKYKQYLKTERDHLIQAIVQHDSHRDKYSIIKEAQEIEEELHLTVGNTHTDDEIKKAIIKTHNAVWRSKQLHGQFPHKVLDQANIDAELSFKWIKKQQISPKLESSLFAIQDQAIMTRQHQRDILKESVDGKCRICACKDETTQHIISGCEKLAGTYYVKRHNNLVQYVYWCLAKKHKIEISDLWWKETLIQPQVKENESTKILWEMPVQTDITVTHNRPDLIYIDKTSNKTYLIDITVPSDYNIGAKEIEKLSKYHLLKTEVTRLWNTQTTVIPIVIGATGIVAKSIKKYIDKLGANIDITILQKQAAIHTVTILSKVLGDTVFIHNTQDQHTQNTQESQNMHQSQDPQPQSSQQSPDIPQSSDTLDPLNIAHTLDTQHALSIRRVRGRGRGRGRRRAANNTHHTTDTH

SEQ ID NO: 31943 - protein, 1215 aa, Arctia plantaginis
MFCYFKARSEGPGYIGRLQTLYTERNPNNDKIHKFNGNTLSNQARRVIKQNVISQELLDLIQKQAEGNIVTENPEHISHVTQERHETPSSIHNTLQAIPHTQYSSEQTEAIDQLTNNIEVNDDQDPLVLHYLQILAETKEIPLTERLLLPKAKINKQFIQNLNTLDKFLPNLLVTNTSLREINNIIYAAAKTLILNNNQTPYTPTHTIKPKYDPPWKKRIRNKIEKFRKELGQLIEIERGISTRRMRNIKEKLYSKYNIQNENDHQNAAEILKQKIKALAGRIKRYDDINSRKEQNSLFRENEHRFYKTLGNRNTSKDIKIPSREGVEEFWTSILSKPSQYNTEAKWIKEVERMTSEVSTIDIEEIAEDEVKSAIRKLQNWKAPGIDKIQNYYLKYFTSIHPYLSSLFTNIVAGTEALEDWFTTGKVILIPKNENTEEPKNWRPIACLPSIYKLLTSVLANILYSHCDQNNIMAVEQRGCRRGTRGCKDHLMVNKAILEDAHQTQKNLSMAWIDYQKAFDSVSHEWLLKILDVYKCPSIIKRFLKLVMPSWRVIMTARGSQDSITTEPITIKRGIFQGDSLSPLLFCLAINPLSFILNKYEMKGYKLKDSFWINHLIYMDDLKIYANNGSNLKILLDSVEIFTRDIGMSFGLDKCNVIHIRSGHRSSVRGEGHILLSGEKFQELAIGDRYKYLGIHESGKIEHSVIRDQITKEYFKRIKKLLKTHLNSRSIVKGINTYAIPVLLYSFGVINYKISDLKKIDVKTRKLLAMNKAHQQKAEVKRLYLPLTEGGRGLINVEYMYKTQVVKYKQYLKTERDHLIQAIVQHDSHRDKYSIIKEAQEIEEELHLTVGNTHTDDEIKKAIIKTHNAVWRSKQLHGQFPHKVLDQANIDAELSFKWIKKQQISPKLESSLFAIQDQAIMTRQHQRDILKESVDGKCRICACKDETTQHIISGCEKLAGTYYVKRHNNLVQYVYWCLAKKHKIEICDLWWKETLIQPQVKENESTKILWEMPVQTDITVTHNRPDLIYIDKTSNKTYLIDITVPSDYNIGAKEIEKLSKYHLLKTEVTRLWNTQTTVIPIVIGATGIVAKSIKKYIDKLGANIDITILQKQAAIHTVTILSKVLGDTVFIHNTQDQHTQNTQESQNMHQSQDPQPQSSQQSPDIPQSSDTLDPLNIAHTLDTQHTLSIRRVRGRGRGRGRRRAANNTHHTTDTH

SEQ ID NO: 31944 - protein, 1349 aa, Lymantria monacha
METENNETRIGPLPGGDRRGTSGADAGRLSMRTVSGSLLNRRARVGRTEDATADQRGGEGADDALQSRASPTDSVGSSASTTIGNEDRRRKWSNEETEELLYCYFKARIAGPGYIRKLYTLFKDRNPNNPKIRKFDGNKLSNQARRIIKQNVISQEIQDRIKRQAEGTLTLPSTSTDYVSIDSEHADTAPNIHAITTTANTQQTHYSPEQAATIDELTSNIEVNEDQNPLILQFLQILAETTETTLADRLFLPKAKINKQFIDNLHTINKYIPNLLITNNGLISINNIIYATAKTLIINNNQRPFMPKNTIKPKTDPPWKKRIVNKIEKLRKELGQLIEIKRGTTTRRMINIKNKLYEKYNIKNENDHNNIAETIKQKIKALAARIKRYEEISGRKEQNQLFAENEHKLYRSLGNNNNSDFKLPTKEGIEEFWTSILSTPTKYNTQANWIKEVEETTNTIDTTNIEEITIEQVKTAIRKLLNWKTPGIDKIQNYYLKYLTSTHKYLSLLFTKIITGQEPLEEWFTTGQVILIPKNCNTAEPKNWRPIACLPNIYKLLTSVLADILYSHCDSNDIMSIEQRGCRRGARGCKDHLMVNKAILEDAHQSQKNLSMAWIDYQKAFDTVSHEWLLKVLDIYKCPPVIKRFLEWSMPAWKVIMTARGSQESITTEPIYIKRGIFQGDSLSPLLFCLAINPISFILNKYELKGYKLKDSFWINHLVYMDDLKIYANNKSNLKVLLDSVEIFTSDIGMRFGLDKCNVIHIRAGHRSTVSGEGHILLSQEKFKELQVGDSYKYLGIHESGKIEHSKIREQITKEYTKRVKKLIQTHLNARNIIKGINTYAIPVLLYSFGIINYKITDLKKIDTKTRKLLAIKKAHQQKAEVERLYLPITQGGRGLINVEYMYKSQIVKYKQYLKTEFDDMIKAIVQHDINKDKYSIIKESREIEQQLNLPQNNSHTDTEIKQAIVKTQNTSWRGKQLHGQFPKKVLDQANINTELSFKWIKKQHVSPGIVSAVFAIQDQAVMTLQHQRDILRAAVDGKCRLCRVKDETAQHIISGCEKLAGTYYVKRHNNLVQYVYWCLAKKHKIEVSPLWWKETMIQPQVKENDTTKIMWETPVQTDITVTHNRPDLIYIDKINNKTFLIDISVPSDYNIGAKEIEKLSKYHLLKTEISRLWNTQTAVIPIVVGATGVVAKSINTYLEKLGTTIDITILQKHAAIHSSTIISKVLGDTVFVNNTNTQQELAQNGQQASNTQQSENTQLTTNTQDTNITVDIPETVRGGRGRRSNQTAHTQNTANTQTTHTPEEESHTHRLDTQQTTNINTRQGRIRGRGPRATSTTRTHHTRNRVGI

SEQ ID NO: 31945 - protein, 1349 aa, Lymantria dispar
METDNNETRIGPLPRGDRLGTSGADAGRGSMRTVSGSLLNRRAGVGRTEDVTADQRGGEGADDALQSRASPTDSVGSSASTTIGNEDRRRKWSNKETEELLYCYFKARMAGPGYIRKLYTLFKDRNPNNPKVRKFDGNKLSNQARRIIKQNVISQEIQDRIKRQAEGTLTLAPTSTVYASNDNEHTDTSPNVHAITTSTNTQQTHNSAEQAATIDELTSNIEVNEDQDPLILQFLQILAETKETTLADRLFLPKAKINKQFIDNLHTINKYIPNLLITNTDLISINNIIYATAKTLIINNNQTPFMPKNTIKPKTDPPWKKRIANKIEKLRKELGQFIEVKRGITTRRMINIKNKLYEKYNIKNENDHNNTAETIKQKIKALAARIKRYEEMSGRKEHNQLFAENEHKLYRSLGNNNNTDIKLPTKEGIEEFWTSILSKPTKYNTQANWIKEVEESTNTIDTTNIEEITIEQVKTAVRKLLNWKTPGVDKIQNYYLKYLTSTHKYLSLLFTKIITGQETLEEWFTTGQVILIPKNSNTEEPKNWRPIACLPSIYKLLTSVLADILYSHCDSNNIMAIEQRGCRRGARGCKDHLMVNKAILEDAHQAQKNLSMAWIDYQKAFDTVSHEWLLKVLDIYKCPSVIKSFLKWSMPAWKVIMTARGSHESITTEPIYIKRGIFQGDSLSPLLFCLAINPISFILNKYELKGYKLKDSFWINHLVYMDDLKIYANNKSNLKVLLDSVEIFTSDIGMRFGLDKCNVIHIRAGHRSTVTGEGHILLSQEKFKELEVGNSYKYLGIHESGKIEHSKIREQITKEYIKRVKKLIQTHLNARNIIKGINTYAIPVLLYSFGIINYKITDLKKIDTKTRKLLAIKKAHQQKAEVERLYLPIAQGGRGLINIEYMYKSQIVKYKQYLKMEFDDMIKAIVQHDINRDKYSIIKEAREIEQELHLPQDNLHTDIEIKQAIVKTQNTSWRAKQLHGQFPKKVLDQANINTELSFKWINKQHISPGIVSAVFAIQDQAVMTLQHQRDILRTAVDGKCRLCRVKDETAQHIISGCEKLAGTYYVKRHNNLVQYVYWCLAKKHKIEVSPLWWKETMIQPQVKENDTTKIMWETPVQTDITVTHNRPDLIYIDKINNKTFLIDISVPSDYNIGAKEIEKLSKYHLLKTEISRLWNTQTAVIPIVVGATGVVAKSINTYLEKLNTTIDITILQKQAAIHSTTIISKVLGDTVFVNNANTQEEPAQNEQQTLNTQHSENTQLTTNTQDTNTTPDIPETVSGERGRRGNQTAHTQNTANTQITHTTQEESHTHRTDTQQTTHSNTRQGRTRGRGRRATPTTRTQHTRNRVGI

SEQ ID NO: 31946 - protein, 1278 aa, Telegonus cellus
MPREGRTLETLRVRYTPVTNGALVTFVNMERQFRNRTLGPLPGGDRRGTSGADAGRDSMQTVSGSLLNRRARVGGPENTTAEQRGGEGTDDALQSRASPTDSVGSSVTTTNNTVSDDRRRKWSTEELQELMFCYFKARSDGPGYIDRLHRLFSERNPNNPKIHKFNGNTLSNQARRIIKQNVISQELLDRIQKHAEGRTDVVESSEQNEAEEEEEATIHNSYITTTHDANHIDYTIEEIQSIDQLAQNIEVNEDQDPLILNFLQILSETKETAIEERQLLPKAKINKRFLENLSNLNKFMSNILATNNSLREINNIIYAAAKTLIINNNQLPYTPRNTFKIKSDPPWKKRIQTKIEKFRKKLGQLIEIGKGINTRRMIKIKDKLYRQYNIQNENEHSNIEEILKQKIKALAGRIKRYEDINSRKEQNSLFSENEHKLYRSLGGNSFKDIKLPDKEIVEEFWTSILSNPIHYNSEAKWIKNVEESSSEVNTIDIQEITEEHIKHSIKKLLNWKTPGIDKIQNYYLKYFTSVHSYLGSIFTKIVSRRETLEDWFTTGQVILIPKNEQTEDPKNWRPIACLPTMYKLLSSVLSNVLYDHCHQNNIIAIEQRGCRRGARGCKDHLMVNKAILEDAHQSQKNLSMAWIDYQKAFDSVPHEWLAKVLDVYKCPPIIKRFLEIVMPSWRVIMTARGTQNSLTTEPIYVRRGIFQGDSLSPLLFCLAINPLSFLLNKYEMKGYKLKDSLWINHLLYMDDLKLYANNRHNLTVLLDSVEIFTRDIGMRFGLDKCSIIHISSGHRNKVTGEGHILLEGEIIKQLAIGDRYKYLGIHESGKIEHSVIRDQIIKEYFKRIKKLINTYLNSRNLIKGINTYAIPVLLYSFGVINYKNSDLKKIDTKTRKLLAIKKAHQQKAEVERLYLPIAQGGRGLLNVEYMYKTQIIKYKQYLKAESDDLIKAIVEHDKRRDKYSIINEAQEIENQLHLARGKIHTDKDIREAIVKRCKDIWRNKQLHGQFIKKVLDQANIDTELSFKWIKKQQISPTIESSIFAIQDQSIMTRQHRRDILKEPIDGKCRLCASKDETTQHIISGCEKLAGNYYVKRHNNLVQYVYWCLAKKHKIEVSNIWWKETLTQPQVKENETAKILWEMPVQTDVTITHNRPDLIYVDKTNNKTYLIDVTVPSDYNIGPKEIEKLSKYHLLKNEVSRLWKTQTTIIPIVVGATGIVGKNIKKYVEKLGTFIDISILQKQAAIHTATILSKVLGDTVFVNRTQNNDRQNTEQKTHT

SEQ ID NO: 31947 - protein, 1317 aa, Arctia plantaginis
MENFNIGIRIGSLPGGDRRGTSGAGAGRDSIRTTSGSLLNRRARVGDLENVTAEQRGGEGADDALQSRVSPVDSVGSSTTTTNNAISDDRRRKWSTEELKELMFCYFKARSEGPGYIGRLQTLYIERNPNNDKIHKFNGNTLSNQARRVIKQNVISQELLDLIQKQAEGNIVTENPEHISHATQERHETPSSIHNTLQAIPHTQYSSEQTEAIDQLTNNIVVNDDQDPLVLHYLQILAETKETPLTERLLLPKAKINKQFIQNLNTLDKFLPNLLVTNTSLREINNIIYAAAKTLILNNNQTPYTPTHTIKPKYDPPWKKRIRNKIEKFRKELGQLIEIERGISTRRMRNIKEKLYSKYNIQNENDHQNAAEILKQKIKALAGRIKRYDDINSRKEQNSLFKENEHRFYKTLGNRNTSKDIKIPSREGVEEFWTSILSKPSQYNTEAKWIKEVETLTSEVSTIDIEEIAEDEVKSAIRKLQNWKAPGIDKIQNYYLKYFTSIHPYLSSLFTNIVAGTEALEDWFTTGKVILIPKNENTEEPKNWRPIACLPSIYKLLTSVLANILYSHCDQNNIMAVEQRGCRRGTRGCKDHLMVNKTILEDAHQTQKNLSMAWIDYQKAFDSVSHEWLLKILDVYKCPSIIKRFLKLVMPSWRVIMTARGSQDSITTEPITIKRGIFQGDSLSPLLFCLAVNPLSFILNKYEMKGYKLKDSFWINHLIYMDDLKIYANNGSNLKILLDSVEIFTRDIGMSFGLDKCNVIHIRSGHRSSVRGEGHILLSGEKLQELAIGDRYKYLGIHESGKIEHSIIRDQITKEYFKRIKKLLNTHLNSRSIVKGINTYAIPVLLYSFGVINYKISDLKKVDVKTRKLLAINKAHQQKAEVKRLYLPLTEGGRGLINVEYMYKTQVVKYKQYLKTEKDHLIQAIVQHDSHRDKYSIIKEAQEIEEELHLTVGNTHTDEEIKKAIIKTHNAVWRSKQLHGQFQHKVLDQANIDAELSFKWIKKQQISPKLESSLFAIQDQAIMTRQHQRDILKESVDGKCRICACKDETTQHIISGCEKLAGTYYVKRHNNLVQYVYWCLAKKHKIEISDLWWKETLIQPQVKENESCKILWEMPVQTDITVTHNRPDLIYIDKTSNKTYLIDITVPSDYNIGAKEIEKLSKYHLLKTEVTRLWNTQTNVIPIVIGATGIVAKSIKKYIDKLGANIDITILQKQAAIHTVTILSKVLGDTVFIHNTQDQHTQNTQESQNMHQSQDPQPQGSQQSPDIPQSSDSLDPLNIAHTLDTQHTLSIRRVRGRGRGRGRRRAANNTHHTTDTH

SEQ ID NO: 31948 - protein, 1197 aa, Idaea aversata
MEELMFCYYKARVEGSGYMNRLQRIFIERNPRNPKVNRFNGQSLSTQARTIIKHKMLSQEVLNRIQQDAEVTEHIEDTEPINHTPTDTQSTQNLPQVDNQTSDTIQTYTPEQAQIIDQVTQNILDSENQDPIILQLLNILSETKETPISERKLLPKAKINKQFIGNCQKLNKFLPNLLEINTSLREINDIIYATAKTLIVNNNQMPYEPRNTVKPKTNPAWKKRIQKKIENFRKELGKLIEIGRGVSSRRMIRTRDYLYSKYNIHNENDHSNTVEFLKQKVKALAGRIKRYEELNDRKEQNKLFRENEHRLYRSLGSNSNSSDIKIPSKDSVEQFWGSILSNPIQYNTDARWIKEIEESVDEVNTVESEEITVLEVKFAIRKLHNWKSPGIDKVQNYYLKYLTSTHKYLAKLYTKIVQGSEHLEDWFTTGQVILIPKNSDTENPKNWRPIACLPSMYKLLTSVLANVLYSHCSNNNIMAAEQRGCRRGARGCKDHLMVNKAILEDAHTSQKNLSMAWIDYQKAFDSVSHAWLLKILDVYQCPPMVKKFLEMSMPNWKVVMTARGTHESITTEPIYIRRGIFQGDSLSPLLFCLAMNPLSLILNKYEHKGYKLKDSYFINHLLYMDDLKLYANNRSNLKVLLDSVEVFTADIGMRFGLDKCSVLHLSLGHRSSTTGEGHVLLNGEEFNELEVGNTYKYLGVSESGKIEHSAVREQVTKEYFKRVKKLLNSHLNSRNIIKGINTYAIPVLMYSFGIINYKNSDLKKIDTKTRKLLNIKKAHQQKADVERLYLPVTQGGRGLLNVENIYKTQIIKYKQYLRIEQDHLIKTIVQHDINKDKYSIIKEAEVIETELQLEIDNRHTDREIKEAIIKKQNERWRNKQLHGQFAKVVLDQANVDIEQSFRWIKKQQVSPSIESSIFAIQDQAVMTRQHQRDILKEAVDGKCRLCAAKDETAQHIISGCEKLAGTYYVKRHNNLVQYVYWCLARKHNMDVNKLWWKETLTQPKVVENDTAKIMWEIPIQTDTTVSHNRPDLVYTDKTSNNTYLIDITVPSDYNIGAKEVEKLSKYHLLKTELKRIWNTTTHVIPIVIGSTGIIAKSLTRYIEKLDSKIDITILQKQAAIHTTIILSKVLGDTVFVNSNANTDQIEPNHSHSITQTSSDTQALNTQSTHNNTQTLNTQSTHNNTQSTIGRRRIRLQL

SEQ ID NO: 31949 - protein, 1248 aa, Urbanus velinus
MERQFRNRTLGPLPGGDRRGTSGADAGRDSMQTVSDSLLNRRARVGGPENTTAEQRGGEGTGGALQSRASPTDSVGSSVSTTNNTVSDDRRRKWSTEELQELMFCYFKARLDGPGYIDRLHRFFSERNPNNPKIHKFNGNTLSNQARRIIKQNVISQELLDRIQKQAEGRTEEVESFEQNEVEEEEATIHSHITIAHNTNHIEYTIEQIQTIDQLAQNIEVNEDQDPLILNFLQILSETRETAIEERQLLPKAKINKHFIENLCVLNNFLPNILATNNSLRDINDIIYAVARTLIIKNNQLPYTPKNTFKIKSDPPWKRRIQTKIERFRKELGQLIEIGRGINTRRMLNIRDKLYTKYNIQNENEHSNVEEILKQKIKALAGRIKRYEDINGRKEQNSLFRENEHKLYKSLGGNSLKDIKLPDKKNVEEFWKSILSNPMHYNSQARWIKEVEQSSSEVNTIDIEEISEEHIKQAAKKLLNWKTPGIDRIQNYYLKYLTNVHSYLGSVFTKIVSRREDLEDWFTTGQVILIPKNEETEEPKNWRPIACLPTMYKLLSSVLSNILYDHCHQNNIIAIEQRGCRRGARGCKDHLMVNKAILEDAHQSQKNLSMAWIDYQKAFDSVPHEWLAKVLDVYKCPPIIKRFLEIVMPSWRVIMTARGSQNSLTTEPIYVKRGIFQGDSLSPLLFCLAVNPLSFVLNKYEMKGYKLKESLWINHLLYMDDLKLYANSRHNLKVLLDSVEIFTRDIGMRFGLDKCNTIHISSGHRSKVTGEGHILLEGETIKQLAIGDRYKYLGIHESGKIEHSVVRDQIIKEYFKRIKKLINTYLNSRNLIKGINTYAIPVLLYSFGVINYKNSDVKKIDTKTRKLLAMKKAHQQKAEVERLYLPISQGGRGLLNVEYMYKTQIVKYKQYLKAKGDDLIKAIVEHDSRRNKYSIINEAQEIENQLHLTRGNNHTDKDIREAIVKRSKDIWRNKQLHGQFIKKVLDQANIDTELSFKWIKKQQISPTIESSVFAIQDQCIMTRQHRRDILKEPVDGKCRLCASKDETTQHIISGCEKLAGNYYVKRHNNLVQYVYWCLAKKHKIEVSSLWWKESLIQPQVKENETAKILWEMPVQTDTTITHNRPDLIYIDKINNKTYLIDVTVPSDYNIGPKEIEKLSKYHLLKNEVSRLWKTQTTIIPIVIGATGIVGKNIKKYIDKLDTYIDITILQKQAAIHTSTILSKVLGDTVFVNNSQNHDPQNTQQPTHT

SEQ ID NO: 31950 - protein, 1349 aa, Lymantria monacha
METENNETRIGPLPGGDRRGTSGADAGRLSMRTVSGSLLNRRARVGRTEDATADQRGGEGADDALQSRASPTDSVGSSASTTIGNEDRRRKWSNEETEELLYCYFKARIAGSGYIRKLYTLFKDRNPNNPKIRKFDGNKLSNQARRIIKQNVISQEIQDRIKRQAEGTLTLPSTSTDYVSIDSEHADTAPNIHAVTTTANTQQTHNSPEQAATIDELTSNIEVNEDQNPLILQFLQILAETTETTLADRLFLPKAKINKQFIDNLHTINKYIPNLLITNNGLISINNIIYATAKTLIINNNQRPFMPKNTIKPKTDPPWKKRIVNKIEKLRKELGQLIEIKRGTTTRRMINIKNKLYEKYNIKNENDHNNIAETIKQKIKALAARIKRYEEISGRKEQNQLFAENEHKLYRSLGNNNNSDTKLPTKEGIEEFWTSILSTPTKYNTQANWIKEVEETTNTIDTTNIEEITIEQVKTAIRKLFNWKTPGIDKIQNYYLKYLTSTHKYLSLLFTKIITGQEPLEEWFTTGQVILIPKNCNTAEPKNWRPIACLPSIYKLLTSVLADILYSHCDSNDIMSIEQRGCRRGARGCKDHLMVNKAILEDAHQSQKNLSMAWIDYQKAFDTVSHEWLLKVLDIYKCPPVIKRFLEWSMPAWKVIMTARGSQESITTEPIYIKRGIFQGDSLSPLLFCLAINPISFILNKYELKGYKLKDSFWINHLVYMDDLKIYANNKSNLKVLLDSVEIFTSDIGMQFGFDKCNVIHIKAGHRSTVSGEGHILLSQEKFKELEVGDSYKYLGIHESGKIEHSKIREQITKEYTKRVKKLIQTHLNARNIIKGINTYAIPVLLYSFGIINYKITDLKKIDTKTRKLLAIKKAHQQKAEVERLYLPIAQGGRGLINVEYMYKTQIVKYKQYLKTEFNDMIRAIVQHDINKDKYSIIKESREIEQQLHLPQNNSHTDTEIKQAIVKTQNTSWRAKQLHGQFPKKVLDQANINTELSFKWIKKQHVSPGIVSAVFAIQDQAVMTLQHQRDILRAAVDGKCRLCRVKDETAQHIISGCEKLAGTYYVKRHNNLVQYVYWCLAKKHKIEVSPLWWKETMIQPQVKENDTTKIMWETPVQTDITVTHNRPDLIYVDKINNKTFLIDISVPSDYNIGAKEIEKLSKYHLLKTEISRLWNTQTAVIPIVVGATGVVAKSINTYLEKLGTTIDITILQKQAAIHSSTIISKVLGDTVFVNNTNTQQALAQNEQQASNTQQSEKTQLPTNTQDTNITVDFPETVRGGRVRRSNQTAHTQNTANTQTTHTPEEESHTHRLDTQQTTNINTRQGRTRGRGPRATSTTRTHHTRNRVGI

SEQ ID NO: 31951 - protein, 1351 aa, Emesis lacrines
MKRQLKDSRIGPLPGGERRGTSGADAGRDSMRTVSGSLLSRRARVGGPEDTTAENRGGVGTDDALQSGASTPIEHTAGSSGETTENINDDRRRKWSKEEEKELMFCFFKAQSQGPGYINRLYTLFRDRNPNNTKIDKFNGNTLSNQARRIIKQNVLSQELLNRIKDEAEGRVTVNIYTTNNTTEPNFVTNTSIAQYNSHTNTQHEANTNTHHTSNIDSQLSVDQTDLINQLTGNITVTEDQDPLILNFLQVLAETKETAINDRLFLPKAKINRHFIQNLQMLNNYLPNLLVTTNTLRELNNIIYATAKTLIINNRQTPFVPKNCIKVISDPPWKKRIKIRIEKFRKELGQLIEIGRGVNTRRMNNIKTKLYSKYNIHQENERSNTVEILTQKIKALAGRIKRYEESSQRKEQNRMFKDNEHRLYKSLGHNTTNHDVKLPSKDNIEEFWKSILSNPIQYNKNAKWIREIENTLNRINTVESQEITEEQVKTSITKLNNWKTPGIDKIHNYYLKYLTSTHKHLATVFSNIIRGQEELEEWFTTGQVILIPKNTNTEDAKNWRPIACLPSIYKLITSILANQLYSHCQENNIMAIEQRGCRRRARGCKDHLMINKAILEDAHQSQKNLSMAWIDYQKAFDSVSHEWLLRVLDIYKCPPMIGTFLKRAIPTWKVVMTARGTHESITTEPINIKRGIFQGDSLSPLLFCLAINPISYILNKYEMKGYKLKDSFWVNHLLYMDDLKVYANNKYNLKVLLDSIEIFTNDIGMKFGLSKCNTIHIRSGHRSNTAGDGHVLLSGDTFEELGIHKTYKYLGIHESGKIEHSKIREQVTKEYFRRTKLLLNTHLNSRNVIKGINTYAIPVLLYSFGIINFKFSDLKAIDIKTRKLLAIKKAQQQKSDIERLYLPIIEGGRGLINVENMYKIQILKYKQYLDREYDDLIKVIVQHDKNRDKYSIMKDAREIERDLQITQNNIHTDKDIKQAIVEKQKVRWRNKQLHGQFPKAVLDQANIDRENSFKWIKKQQIPPSIESAIFAIQDQAVMTRQHQRDILKLDTDGKCRLCASKDETTQHIISGCEKLAGAYYVKRHNSLVQYVHWCLAKKHNIEVSSLWWKETLTQPQIKENEQAKIMWEIPIQTDVTVTHNRPDLIYVDKSKNITFLIDIAVPSDYNIGAKEIEKLSKYHLLKTEIRRLWNTQTNVIPIVVGATGIISKSIHRYIQQLNTTIDITILQKQAAIHTTTILSKVLGDTVFTNSTSNTHGPVQEPQQTAHLSTQQTSLIVVSQQTLVTQSTSDTQESSTHIQQTPDTPTPGMQQTSHTVTSQSITVHRSLQTPNIQNHTVNTQATTRTRRSARRR

SEQ ID NO: 31952 - protein, 1206 aa, Urbanus proteus
MERQFRNRTLGPLPGGDRRGTSGADAGRDSMQTVSDSLLNRRARVGGPENTTAEQRGGEGTGGALQSRALPTDSVGSSVSTTNNTVSDDRRRKWSTGELQELMFCYFKARLDGPGYIDRLHRFFAERNPNNPKIHKFNGNTLSNQARRIIKQNVISQELLDRIQKQAEGRTEEVESFEQNEVEEEEATIHSHITNTHNTNHIEYTIEQIHTIDQLAQNIEVNEDQDPLILNFLQILSETRETAIEERQLLPKAKINKSFIENLCVLNNFLPNILATNNSLREINDIIYAAAKALIIKNNQLPYTPKNTFKIKSNPPWKRRIQTKIERFRKELGQLIEIGRGINTRRMINIKDKLYRQYNIQNENEHSNVEEILKQKIKALAARIKRYEDMNGRKEQNSLFRENEHKLYRSLGGNSLKDIKLPDKNNVEEFWKSILSNPIHYNSQATWIKEVEESSSEVNTIDIEEISEEHIKQATKKLLNWKTPGIDKIQNYYLKYLTNVHSYLGSVFTKIVSRREDLEDWFTTGQVILIPKNEETEDPKNWRPIACLPTMYKLLSSVLSNILYDHCHQNNIIAIEQRGCRRGVRGCKDHLMVNKAILEDAHQSQKNLSMAWIDYQKAFDSVPHEWLAKVLDVYKCPPIIKRFLEIVMPSWRVIMTARGSQNSLTTEPIYVKRGIFQGDSLSPLLFCLAVNPLSFVLNKYEMKGYKLKDSLWINHLLYMDDLKLYANNRHNLKVLLDSVEIFTKDIGMRFGLDKCNTIHISSGHRSKVTGEGHILLEGETIKQLAIGDRYKYLGIHESGKIEHSVVRDQIIKEYFNRIKKLINTYLNSRNLIKGINTFAIPVLLYSFGVINYKNSDLKKIDTKTRKLLAMKKAHQQKAEVERLYLPISQGGRGLLNVEYMYKTQIVKYKQYLKAESDDLIKAIVEHDSRRNKYSIINEAQEIENQLHLTRGNNHTDKDIREAIVKRRKDIWRNKQLHGQFIKKVLDQANIDTELSFKWIKKQQISPTIESSIFAIQDQCIMTRQHRRDILKEPVDGKCRLCASKDETTQHIISGCEKLAGNYYVKRHNNLVQYVYWCLAKKHKIEVSSLWWKESLIQPQVKENETAKILWEMPVQTDATITHNRPDLIYIDKINNKTYLIDVTVPSDYNIGPKEIEKLSKYHLLKNEVSRLWKTQTTIIPIVIGATGIVGKNIKKYIDKLGTFIDI

SEQ ID NO: 31953 - protein, 1317 aa, Arctia plantaginis
MENFNIGIRIGSLPGGDRRGTSGAGAGRDSIRTTSGSLLNRRARVGDLENVTAEQRGGEGADDALQSRVSPVDSVGSSTTTTNNAISDDRRRKWSTEELKELMFCYFKARSEGPGYIGRLQTLYTERNPNNDKIHKFNGNTLSNQARRVIKQNVISQELLDLIQKQAEGNIVTENPEHISHATQERHETPSSIHNTLQAIPHTQYFSEQTEAIDQLTNNIEVNDDQDPLVLHYLQILAETKETPLTERLLLPKAKINKQFIQNLNTLDKFLPNLLVTNTSLREINNIIYAAAKTLILNNNQTPYTPTHTIKPKYDPPWKKRIRNKIEKFRKELGQLIEIERGISTRRMRNIKEKLYSKYNIQNENDHQNAAEILKQKIKALAGRIKRYDDINSRKEQNSLFKENEHRFYKTLGNRNTSKDIKIPSREGVEEFWTSILSKPSQYNTEAKWIKEVETLTSEVSTIDIEEIAEDEVKSAIRKLQNWKAPGIDKIQNYYLKYFTSIHPYLSSLFTNIVAGTEALEDWFTTGKVILIPKNENTEEPKNWRPIACLPSIYKLLTSVLANILYSHCDQNNIMAVEQRGCRRGTRGCKVHLMVNKAILEDAHQTQKNLSMAWIDYQKAFDSVSHEWLLKILDVYKCPSIIKRFLKLVMPSWRVIMTARGSQDSITTEPITIKRGIFQGDSLSPLLFCLAINPLSFILNKYEMKGYKLKDSFWINHLIYMDDLKIYANNGSNLKILLDSVEIFTRDIGMSFGLDKCNVIHIRSGHRSSVRGEGHILLSGEKFQELAIGDRYKYLGIHESGKIEHSIIRNQITKEYFKRIKKLLNTHLNSRSIVKGINTYAIPVLLYSFGVINYKISDLKKVDVKTRKLLAINKAHQQKAEVKRLYLPLTEGGRGLINVEYMYKTQVVKYKQYLKTEKDHLIQAIVQHDSHRDKYSIIKEAQEIEEELHLTVGNTHTDEEIKKAIIKTHNAVWRSKQLHGQFPHKVLDQANIDAELSFKWIKKQQISPKLESSLFAIQDQAIMTRQHQRDILKESVDGKCRICACKDETTQHIISGCEKLAGTYYVKRHNNLVQYVYWCLAKKHKIEISDLWWKETLIQPQVKENESTKILWEMPVQTDITVTHNRPDLIYIDKTSNKTYLIDITVPSDYNIGAKEIEKLSKYHLLKTEVTRLWNTQTTVIPIVIGATGIVAKSIKKYIDKLGANIDIIILQKQAAIHTVTILSKVLGDTVFIHSTQDQHTQNTQESQNMHQSQDPQPQSSQQSLDIPQFSDSLDPLNIAHTLDTQHTLSIRRVRGRGRGRGRKRAANNTHHTTDTH

SEQ ID NO: 31954 - protein, 1349 aa, Lymantria monacha
METENNETRIGPLPGGDRRGTSGADAGRLSMRTVSGSLLNRRARVGRTEDATADQRGGEGADDALQSRASPTDSVGSSASTTIGNEDRRRKWSNEETEELLYCYFKARIAGPGYIRKLYTLFKDRNPNNPKIRKFDGNKLSNQARRIIKQNVISQEIQDRIKRQAEGTLTLPSTSTDYVSIDSEHADTAPNIHAITTTANTQQTHYSPEQAATIDELTSNIEVNEDQNPLILQFLQILAETTETTLADRLFLPKAKINKQFIDNLHTINKYIPNLLITNNGLISINNIIYATAKTLIINNNQRPFMPKNTIKPKTDPPWKKRIVNKIEKLRKELGQLIEIKRGTTTRRMINIKNKLYEKYNIKNENDHNNIAETIKQKIKALAARIKRYEEISGRKEQNQLFAENEHKLYRSLGNNNNSDIKLPTKEGIEEFWTSILSTPTKYNTQANWIKEVEETTNTIDTTNIEEITIEQVKTAIRKLLNWKTPGIDKIQNYYLKYLTSTHKYLSLLFTKIITGQEPLEEWFTTGQVILIPKNCNTAEPKNWRPIACLPNIYKLLTSVLADILYSHCDSNDIMSIEQRGCRRGARGCKDHLMVNKAILEDAHQSQKNLSMAWIDYQKAFDTVSHEWLLKVLDIYKCPPVIKRFLEWSMPAWKVIMTARGSQESITTEPIYIKRGIFQGDSLSPLLFCLAINPISFILNKYELKGYKLKDSFWINHLVYMDDLKIYANNKSNLKVLLDSVEIFTSDIGMRFGLDKCNVIHIRAGHRSTVSGEGHILLSQEKFKELQVGDSYKYLGIHESGKIEHSKIREQITKEYTKRVKKLIQTHLNARNIIKGINTYAIPVLLYSFGIINYKITDLKKIDTKTRKLLAIKKAHQQKAEVERLYLPITQGGRGLINVEYMYKSQIVKYKQYLKTEFDDMIKAIVQHDINKDKYSIIKESREIEQQLNLPQNNSHTDTEIKQAIVKTQNTSWRGKQLHGQFPKKVLDQANINTELSFKWIKKQHVSPGIVSAVFAIQDQAVMTLQHQRDILRAAVDGKCRLCRVKDETAQHIISGCEKLAGTYYVKRHNNLVQYVYWCLAKKHKIEVSPLWWKETMIQPQVKENDTTKIMWETPVQTDITVTHNRPDLIYIDKINNKTFLIDISVPSDYNIGAKEIEKLSKYHLLKTEISRLWNTQTAVIPIVVGATGIVAKSINTYLDKLGTTIDITILQKQAAIHSSTIISKVLGDTVFVNNTNTQQELAQNGQQASNTQQSENTQLTTNTQDTNITVDIPETVRGGRGRRSNQTAHTQNTANTQTTHTPEEESHTHRLDTQQTTNINTRQGRIRGRGPRATSTTRTHHTRNRVGI

SEQ ID NO: 31955 - protein, 1193 aa, Lymantria dispar
MTTNTQTHTLNIHAITTSTSCASNDNEHTDTSPNVHAITTSTNTQQTHNSAEQAATIDELTSNIEVNEDQDPLILQFLQILAETKETTLADRLFLPKAKINKQFIDNLHTINKYIPNLLITNTDLISINHIIYATAKTLIINNNQTPFMPKNTIKPKTDPPWKKRIANKIEKLRKELGQLIEVKRGITTRRMINIKNKLYEKYNIKNENDHNNTAETIKQKIKALAARIKRYEEMSGRKEHNQLFAENEHKLYRSLGNNNNTDIKLPTKEGIEEFWTSILSKPTKYNTQANWIKEVEESTNTIDTTNIEEITIEQVKTAVRKLLNWKTPGVDKIQNYYLKYLTSTHKYLSLLFTKIITGQETLEEWFTTGQVILIPKNSNTEEPKNWRPIACLPSIYKLLTSVLADILYSHCDSNNNIMAIEQRGCRRGARGCKDHLMVNKAILEDAHQAQKNLSMAWIDYQKAFDTVSHEWLLKVLDIYKCPPVIKSFLKWSMLAWKVIMTARGSHESITTEPIYIKRGIFQGDSLSPLLFCLAINPISFILNKYELKGYKLKDSFWINHLVYMDDLKINANNKSNLKVLLDSVEIFTSDIGMRFGLDKCNVIHIRAGHRSTVTGEGHILLSQEKFKELEVGNSYKYLGIHESGKIAHSKIREQITKEYIKRVKKLIQTHLNARNIIKGINTYAIPVLLYSFGIINYKITDLKKIDTKTRKLLAIKKAHQQKAEVERLYLPIAQGGRGLINIEYMYKTQIVKYKQYLKTEFDDMIKAIVQHDINRSKYSIIKEAREIEQELHLPQDNLHTDTEIKQAIVKTQNTSWRAKQLHGQFPKKVLDQANINTELSFKWINKQHISPGIVSAVFAIQDQAMMTLQHQRDILRTTVDGKCRLCRVKDETAQHIISGCEKLAGTYYVKRHNNLVQYVYWCLAKKHKIEVSPLWWKETMIQPQVKENDTTKIMWETPVQTDITVTHNRPDLIYIDKINNKTFLIDISVPSDYNIGAKEIEKLSKYHLLKTEIGRLWNTQTAVIPIVVGATGVVAKSINTYLEKLNTTVDITILQKQAAIHSTTIISKVLGDTVFVNNANTQEEPAQNEQQTLNTQHSENTQLITNTQDTNTTPDIPETVSGERGRRGNQTAHTQNTANTQITHTTQEESHTHRTDTQQTTHSNTRQGRTRGRGRRATPTTRTQHTRNRVGI

SEQ ID NO: 31956 - protein, 1317 aa, Arctia plantaginis
MENFNIGIRIGSLPGGDRRGTSGAGAGRDSIRTTSGSLLNRRARVGDLENVTAEQRGGEGADDALQSRVSPVDSVGSSTTTTNNAISDDRRRKWSTEELKELMFCYFKARSEGPGYIGRLQTLYTERNPNNDKIHKFNGNTLSNQARRVIKQNVISQELLDLIQKQAEGNTVTENPEHISHATQERHETPSSIHNTLQAIPHTQYSSEQTEAIDQLTNNIEVNDDQEPLVLHYLQILAETKETPLTERLLLPKAKINKQFIQNLNTLDKFLPNLLVTNTSLREINNIIYAAAKTLILNNNQTPYTPTHTIKPKYDPPWKKRIRNKIEKLRKELGQLIEIERGISTRRMRNIKEKLYSKYNIQNENDHQNAAEILKQKIKALAGRIKRYDDINSRKEQNSLFRENEHRFYKTLGNRNTSKDIKIPSREGVEEFWTSILSKPSQYNTEAKWIKEVETLTSEVSTIDIEEIAEDEVKSAIRKLQNWKAPGIDKIQNYYLKYFTSIHPYLSSLFTNIVAGTEALEDWFTTGKVILIPKNENTEEPKNWRPIACLPSIYKLLTSVLANILYSHCDQNNIMAVEQRGCRRGTRGCKDHLMVNKAILEDAHQTQKNLSMAWIDYQKAFDSVSHEWLLKILDVYKCPSIIKRFLKLVMPSWRVIMTARGSQDSITTEPITIKRGIFQGDSLSPLLFCLAINPLSFILNKYEMKGYKLKDSFWINHLIYMDDLKIYANNGSNLKILLDSVEIFTRDIGMSFGLDKCNVIHIRSGYRSSVRGEGHILLSGEKFQDLAIGDRYKYLGIHESGKIEHSVIRDQITKEYFKRFKKLLNTHLNSRSIVKGINTYAIPVLLYSFGVINYKISDLKKIDVKTRKLLAMNKAHQQKAEVKRLYLPLTEGGRGLINVEYMYKTQIVKYKQYLKTERDHLIQAIVQHDSHRDKYSIIKEAQEIEEELHLTAGNTHTDDEIKKAIIKTHNAVWRSKQLHGQFPHKVLDQANIDAELSFKWIKKQQISPKLESSLFAIQDQAIMTRQHQRDILKESVDGKCRICACKDETTQHIISGCEKLAGTYYVKRHNNLVQYVNWCLAKKHKIEISDLWWKETLIQPQVKENESTKILWEMPVQTDITVTHNRPDLIYIDKTSNKTYLIDITVPSDYNIGAKEIEKLSKYHLLKTEVTRLWNTQTTVIPIVIGATGIVAKSIKKYIDKLGANIDITILQKQAAIHTVTILSKVLGDTVFIHSTQDQHTQNTQESQNMHQSQDPKPQDSQQSPDIPQSSDTLDPLNIAHTLDTQHTLSIRRVRGRGRGRGRRRAANNTHHTTDTH

SEQ ID NO: 31957 - protein, 1215 aa, Arctia plantaginis
MFCYFQARSEGPGYIGRLQALYTERNPNNDKIHKFNGNTLSNQARRVIKQNVISQELLDLIQKQAEGNIVTENPEHISHATQERHETPSYTHNTLQAIPHTQYSSEQTEAIDQLTNNIEVNDDQDPLVLHYLQILAETKETPLTERLLLPKAKINKQFIQNLNTLDKFLPNLLVTNTSLREINNIIYAAAKTLILNNNQTPYTPTHTIKPKYDPPWKKRIRNKIEKFRKELGQLIEIERGISTRRMRNIKEKLYNKYNIQNENDHQNAAEILKQKIKALAGRIKRYDDINSRKEQNSLFRENEHRFYKTLGNRNTSKDIKIPSREGVEEFWTSILSKPSQYNTEAKWIKEVERMTSEVSTIDIEEIAEDEVKSAIRKLQNWKAPGMDKIQNYYLKYFTSIHPYLSSLFTNIVAGTEALEDWFTTGKVILIPKNENTEEPKNWRPIACLPSIYKLLTSVLANILYSHCDQNNIMAVEQRGCRRGTRGCKDHLMVNKAILEDAHQTQKNLSMAWIDYQKAFDSVSHEWLLKILDVYKCPSIIKRFLKLVMPSWRVIMTARGSQDSITTEPITIKRGIFQGDSLSPLLFCLAINPLAFILNKYEMKGYKLKDSFWINHLIYMDDLKIYANNGSNLKILLDSVEIFTKDIGMSFGLDKCNVIHIRSGHRSSVRGEGHILLSGEKFQELAIGDRYKYLGIHESGKIEHSIIRDQITKEYFKRIKKLLNTHLNSRSIVKGINTYAIPVLLYSFGVINYKISDLKKVDVKTRKLLAINKAHQQKAEVKRLYLPLTEGGRGLINVEYMYKTQVVKYKQYLKTEKDHLIQAIVQHDSHRDKYSIIKEAQEIEEELHLTVGNTHTDDEIKKAIIKTHNAVWRSKQLHGQFPHKVLDQANIDAELSFKWIKKQQISPKLESSLFAIQDQAIMTRQHQRDILKESVDGKCRICACKDETTQHIISGCEKLAGTYYVKRHNNLVQYVYWCLAKKHKIEISDLWWKETLIQPQVKENESCKILWEMPVQTDITVTHNRPDLIYIDKTSNKTYLIDITVPSDYNIGAKEIEKLSKYHLLKTEVTRLWNTQTTVIPIVIGATGIVAKSIKKYIDKLGANIDITILQKQAAIHTVTILSKVLGDTVFIHNTQDQHTQNTQELQNMHQSQDPQPQGSQQSQDIPQSSDSLDPLNIAHTLDTQHTLSIRRVRGRGRRRGRRRAANNTHHTTDTH

SEQ ID NO: 31958 - protein, 1171 aa, Ochropleura plecta
MYCFFKAQSQGPGYINRLFTLFTDRNPTNPKIHKFNGNTLSNQARRVIKQNVLSQELLNCIRDEAEGRVTETTEITNSMTGPNSTTDAPIIQRDLHTNTQHETNTNTQHSLEQAELIDQLTRNVTVTEDQDPLILSFLQVLAETKETPIKDRYLLPKAKINKHFVQNLHALNSYLPNLLITTDTLRELNNIIYAAAKTLILNNKQIPFIPKNVIKPISDPPWKKRIKNKIDKYRKELGQLIEIGRGVNTRRMNNIKTKLYNKYNIQSENERNNTEEILKQKIKALAGRIKRFEEISNRKEQNRLFNENEHRLYRSLGNNSTTYDIKLPSKESVEEFWKSILSKPIQYNKDAKWIEELEITSDKINTAELQEITVEQVKIAIRKLHNWKTPGIDKIHNYYLKYLTSTHQYFATAFTNIIEGKEQLEEWFTLGQVILIPKNENTENAQNWRPIACLPSIYKLLTSILANQLYDHCQENNIMAIEQRGCRRGARGCKDHLMVNKAILEDAHQSAKNLSMAWIDYQKAFDSVSHEWLLRILEIYRCPPIIKTFLEIAMPTWKVIMSARGTNEFLTTDPIYIKRGIFQGDSLSPLLFCLAINPISLILSKYEMKGYKLKDSFWINHLLYMDDLKIYANNNSNLKVLLDSVEIFTNDIGMSFGLNKCNTIQIRSGHVNNTTGEGHILISGDTFEQLGIDRTYKYLGIHESGKIEHSKIREQVTKEYFKRTKKLLNTHLSSRNIIKGINTYAVPVLLYSFGIINYKNSDLKAIDTKTRKLLAIKKAQKQKADVERLYLPIVEGGRGLINAENMYKTQILKYKQYLERENDDLIKVIVQHDKNRYKYSIIKEAQEIERELQLTQNNIHTDKEIKEAIVKKQKEKWRNKQLHGQFPKAVLDQTNIDKENSFKWLKKQQISPSIESAIFAIQDQAINTRQHQRDIFKVNIDGKCRLCVNKDETTQHIISGCEKLAGTYYVKRHNNLVQYVHWCLAKKHNIDVSSLWWKEALTQPQVKENEQAKIMWEIPIQTDVTVTHNRPDLIYVDKTKNLTFLIDIAVPSDYNIGAKEIEKLSKYHLLKTEIRRLWNTQTAVIPIVIGATGIISKSLQRYIDQLNTKVDITVLQKQAAIHTTIILSKVLGDTVFVHGTPRTQEPTTDTQHTVDSQQSSITTTFIFLTHT

SEQ ID NO: 31959 - protein, 1044 aa, Lymantria monacha
MPKNTIKPKTDPPWKKRIVNKIEKLRKELGQLIEIKRGTTTRRMINIKNKLYEKYNIKNENDHNNIAETIKQKIKALAARIKRYEEISGRKEQNQLFAENEHKLYRSLGNNNNSDTKLPTKEGIEEFWTSILSTPTKYNTQANWIKEVEETTNTIDTTNIEEITIEQVKTAIRKLFNWKTPGIDKIQNYYLKYLTSTHKYLSLLFTKIITGQEPLEEWFTTGQVILIPKNCNTAEPKNWRPIACLPSIYKLLTSVLADILYSHCDSNDIMSIEQRGCRRGARGCKDHLMVNKAILEDAHQSQKNLSMAWIDYQKAFDTVSHEWLLKVLDIYKCPPVIKRFLEWSMPAWKVIMTARGSQESITTEPIYIKRGIFQGDSLSPLLFCLAINPISFILNKYELKGYKLKDSFWINHLVYMDDLKIYANNKSNLKVLLDSVEIFTSDIGMQFGFDKCNVIHIKAGHRSTVSGEGHILLSQEKFKELEVGDSYKYLGIHESGKIEHSKIREQITKEYTKRVKKLIQTHLNARNIIKGINTYAIPVLLYSFGIINYKITDLKKIDTKTRKLLAIKKAHQQKAEVERLYLPIAQGGRGLINVEYMYKTQIVKYKQYLKTEFDDMIRAIVQHDINKDKYSIIKESREIEQQLHLPQNNSHTDTEIKQAIIKTQNTSWRAKQLHGQFPKKVLDQANINTELSFKWIKKQHVSPGIVSAVFAIQDQAVMTLQHQRDILRAAVDGKCRLCRVKDETAQHIISGCEKLAGTYYVKRHNNLVQYVYWCLAKKHKIEVSPLWWKETMIQPQVKENDTTKIMWETPVQTDITVTHNRPDLIYVDKINNKTFLIDISVPSDYNIGAKEIEKLSKYHLLKTEISRLWNTQTAVIPIVVGATGVVAKSINTYLEKLGTTIDITILQKQAAIHSSTIISKVLGDTVFVNNTNTQQELAQNEQQASNTQQSENTQLTTNTQDTNITVDFPETVRGGRVRRSNQTAHTQNTANTQTTHTPEEESHTHRLDTQQTTNINTRQGRTRGRGPRATSTTRTHHTRNRVGI

SEQ ID NO: 31960 - protein, 1253 aa, Maniola jurtina
METINNRKRIGPLPGGERRGTSGADAGRSSMQTVSDSLLSRRAGVGEPEDSTADQIRGGEGTGDALQIRVSPTDSAGSTAMTTDENISDDKRRKWSIDELTELMFCYYKARADGSGYLARLQKLFTERNPNNPKIHKFNGNKLANQARTVLKHNIISKELLDRVQKQAEGVISTENPEPISNEEQIITPMQTHSTQQQQQNTHQVQHTQNTSEQAEIIDQLTRNIEVNEDQDPLIIQLLQTLAETKETPIEERLLLPKAKINKKFIDSLNLLNNYLPKLLITNNSLREVNNIIYASAKTLIVNNNQTPYAPKNTVKLKSDPPWKKRIQSKIDKLRKELGQLVEIQRGVNTLRMVKIKDRLYTKYNIQSENDHSNTAEIIKQKIKALAGRIKRYVDMNNRKEQNKLFNVNEHRLYRSLGSNGKKDIKVPNKQGLEEFWTSILSNPIEYNYEANWIKEIEHASREVITTDIQEITENQVKSALKKLLNWKSPGLDKIQNYYLKYLTSVHKYLALLFTNIVSGAERLEEWFTTGQVILIPKNENTEDPKNWRPIACLPTMYKLLTSVLADVMYSHCKENNIMAVEQRGCRRGARGCKDHLMTNKSILEDAHQSQKNLSMAWIDYQKAFDSVSHEWLLKLLDIYKCPTIIKRFLQLTMPFWRVIMTARGSQDSITTEPIYIRRGIFQGDSLSPFLFCLAINPLSFILNKYEMKGYKLKDSVWINHLLYMDDLKIYANNTNNLKVLIDSVEIFTNDIGMRFGLDKCNILHISSGCRSNAIGEGHILLSGETFEQLELGQKYKYLGVQESGKIEHNAIREQITKEYFKRVKKLLNTHLNSRNLIKGINTYAIPILLYSFGIINYKNSDLKKIDVKTRKMLAMKKAHMQKADVERLYLPVTEGGRGLINVEFMYKSQIVKYKQYLNEESDYLIKAIVQHDTHRDKYSIMKEAQEIERGLHLQQKNIHTNKEIKDAIIKRHNEAWRSKQLHGQFPKKVLDQANLYKELSFKWMKRQQISPSIEASIFAIQDQAVMTRQHQRDILKEPVDGKCRLCATKDETTQHIISGCEKLAGTYYVKRHNNLVQYVYWCLAKKHNFEVSNLWWKEILTQPQVIENATAKILWEMPVQTDVTVTHNRPDLIYIDKNKNRTFLIDITVPSDYNIGPKEIEKLSKYHLLKTEVSRLWNTQATVIPIVIGATGVVARSIRKYIDILDTNIDISILQKQAAIHTSIIISKVLGDTVFVHNTQPEQHTLRDNIAN

SEQ ID NO: 31961 - protein, 1349 aa, Lymantria dispar
METDNNETRIGPLPRGDRLGTSGADAGRGSMGTVSGSLLNRRAGVGRTEDVTADQRGGEGADDALQSRASPTDSVGSSASTTIGNEDRRRKWSNKETEELLYCYFKARMAGPGYIRKLYTLFKDRNPNNPKVRKFDGNKLSNQARRIIKQNVISQEIQDRIKRQAEGTLTLAPTSTVYASNDNEHTDTSPNVHAITTSTNTQQTHNSAEQAATIDELTSNIEVNEDQDPLILQFLQILAETKETTLADRLFLPKAKINKQFIDNLHTINKYIPNLLITNTDLISINNIIYATAKTLIINNNQTPFMPKNTIKPKTDPPWKKRIANKIEKLRKELGQFIEVKRGITTRRMINIKNKLYEKYNIKNENDHNNTAETIKQKIKALAARIKRYEEMSGRKEHNQLFAENEHKLYRSLGNNNNTDIKLPTKEGIEEFWTSILSKPTKYNTQANWIKEVEESTNTIDTTNIEEITIEQVKTAVRKLLNWKTPGVDKIQNYYLKYLTSTHKYLSLLFTKIITGQETLEEWFTTGQVILIPKNSNTEEPKNWRPIACLPSIYKLLTSVLADILYSHCDSNNIMAIEQRGCRRGARGCKDHLMVNKAILEDAHQAQKNLSMAWIDYQKAFDTVSHEWLLKVLDIYKCPSVIKSFLKWSMPAWKVIMTARGSHESITTEPIYIKRGIFQGDSLSPLLFCLAINPISFILNKYELKGYKLKDSFWINHLVYMDDLKIYANNKSNLKVLLDSVEIFTSDIGMRFGLDKCNVIHIRAGHRSTVTGEGHILLSQEKFKELEVGNSYKYLGIHESGKIEHSKIREQITKEYIKRVKKLIQTHLNARNIIKGINTYAIPVLLYSFGIINYKITDLKKIDTKTRKLLAIKKAHQQKAEVERLYLPIAQGGRGLINIEYMYKSQIVKYKQYLKMEFDDMIKAIVQHDINRDKYSIIKEAREIEQELHLPQDNLHTDIEIKQAIVKTQNTSWRAKQLHGQFPKKVLDQANINTELSFKWINKQHISPGIVSAVFAIQDQAVMTLQHQRDILRTAVDGKCRLCRVKDETAQHIISGCEKLAGTYYVKRHNNLVQYVYWCLAKKHKIEVSPLWWKETMIQPQVKENDTTKIMWETPVQTDITVTHNRPDLIYIDKINNKTFLIDISVPSDYNIGAKEIEKLSKYHLLKTEISRLWNTQTAVIPIVVGATGVVAKSINTYLEKLNTTIDITILQKQAAIHSTTIISKVLGNTVFVNNANTQEKPAQNEQQTLNTQHSENTQLTTNTQDTNTTPDIPETVSGERGRRGNQTAHTQNTANTQITHTTQEESHTHRTDTQQTTHSNTRQGRTRGRGRRATPTTRTQHTRNRVGI

SEQ ID NO: 31962 - protein, 1372 aa, Lymantria dispar
METDNNETRIGPLPRGYRLGTSGADAGRGSMRTVSGSLLNRRAGVGRTEDVTADQRGGEGADDALQSRASPTDSVGSSASTTIGNEDRQRKWSNKETEELLYCYFKARMAGPGYIRKLYTLFKDRNPNNPKVRKFDGNKLSNQARRIIKQNVISQEIQDRIKRQAEGTLTLAPTSTVYASNDNEHSDTSPIIHAITTSKSYASNDNEHTDTSPNIHAITTSTNTQQTHNSAEQAATIDELTSNIEVNEDQDPLIIQFLQILAETKETTLADRLFLPKAKINKQFIDNLHTINKYIPNLLITNNDLISINHIIYATAKTLIINNNQTPFMPKNTIKPKTNPPWKKRIANKIEKLRKELGQLIEVKRGITTRRMINIKNKLYEKYNIKNENDHNNTAETIKQKIKALAARIKRYEEMSGRKEHNQLFAENEHKLYRSLGNNNNTDIKLPTKEGIEEFWTSILSKPTKYNTQANWIKEVEESTITIDTTNIEEITIEQVKTAVRKLLNWKTPGVDKIQNYYLKYLTSTHKYLSLLFTKIITGQETLEEWFTTGQVILIPKNSNTEEPKNWRPIACLPSIYKLLTSVLADILYSHCDSNNIMAIEQRGCRRGARGCKDHLMVNKAILEDAHQAQKNLSMAWIDYQKAFDTVSHEWLLKVLDIYKCPPVIKSFLKWSMPAWKVIMTARGSHESITTEPIYIKRGIFQGDSLSPLLFCLAINPISFILNKYELKGYKLKDSFWINHLVYMDDLKIYANSKSNLKVLLDSAEIFTSDIGMRFGLDKCNVIHIRAGHRSAVTGEGHILLSQEKFKELEVGNSYKYLGIHESGKIEHSKIREQITKEYIKRVKKLIQTHLNARNIIKGINTYAIPVLLYSFGIINYKITDLKKIDTKTRKLLAIKKAHQQKAEVERLYLPIAQGGRGLINIEYMYKTQIVKYKQYLKTEFDDMIKAIVQHDINRDKYSIIKEAREIEQELHLPQDNLHTDTEIKQAIVKTQNTSWRAKQLHGQFPKKVLDQANINTELSFKWINKQHISPGIVSAVFAIQDQAVMTLQHQRDILRTAVDGKCRLCRVKDETAQHIISGCEKLAGTYYVKRHNNLVQYVYWCLAKKHKIEVSPLWWKETMIQPQVKENDTTKIMWETPVQTDITVTHNRPDLIYIDKINNKTFLIDISVPSDYNIGAKEIEKLSKYHLLKTEISRLWNTQTAVIPIVVGATGVVAKSINTYLEKLNTTIDITILQKQAAIHSTTIISKVLGDTVFVNNANTQEEPAQNEQQTLNTQHSENTQLTADTQDTNTTPDIPETFSGGRGRRGNQTAHTQNTANTQISHTTQEESHTHRTDTQQTTHPNTRQGRTRGRGRRATPTTRTQHTRNRVGI

SEQ ID NO: 31963 - protein, 1132 aa, Maniola jurtina
MHNIIERNPNNPKIHKFNGNKLANQARTVLKHNIISKELLDRVQKQAEGVISTENPEPISNEEQIITPMQTHSTQQQQQNTHQVQHTQNTSEQAEIIDQLTRNIEVNEDQDPLIIQLLQTLAETKETPIEERLLLPKAKINKKFIDSLNLLNNYLPKLLITNNSLREVNNIIYASAKTLIVNNNQTPYAPKNTVKPKSDPPWKKRIQSKIDKLRKELGQLVEIQRGVNTLRMVKIKDRLYTKYNIQSENDHSNTAEIIKQKIKALAGRIKRYVDMNNRKEQNKLFNVNEHRLYRSLGSNGKKDIKVPNKQGLEEFWTSILSNPIEYNYEANWIKEIEHASREVITTDIQEITENQVKSALKKLLNWKSPGLDKIQNYYLKYLTSVHKYLALLFTNIVSGAERLEEWFTTGQVILIPKNENTEDPKNWRPIACLPTMYKLLTSVLADVMYSHCEENNIMAVEQRGCRRGARGCKDHLMTNKSILEDAHQSQKNLSMAWIDYQKAFDSVSHEWLLKLLDIYKCPTIIKRFLQLTMPFWRVIMTARGSQDSITTEPIYIRRGIFQGDSLSPFLFCLAINPLSFILNKYEMKGYKLKDSVWINHLLYMDDLKIYANNTNNLKVLIDSVEIFTNDIGMRFGLDKCNILHISSGCRSNAIGEGHILLSGETFEQLELGQKYKYLGVQESGKIEHNAIREQITKEYFKRVKKLLNTHLNSRNLIKGINTYAIPILLYSFGIINYKNSDLKKIDVKTRKMLAMKKAHMQKADVERLYLPVTEGGRGLINVEFMYKSQIVKYKQYLNEESDYLIKAIVQHDTHRDKYSIMKEAQEIERELHLQQKNIHTNKEIKDAIIKRHNEAWRSKQLHGQFPKKVLDQANLYKELSFKWMKRQQISPSIEASIFAIQDQAVMTRQHQRDILKEPVDGKCRLCATKDETTQHIISGCEKLAGTYYVKRHNNLVQYVYWCLAKKHNFEVSNLWWKEILTQPQVIENATAKILWEMPVQTDVTVTHNRPDLIYIDKNKNRTFLIDITVPSDYNIGPKEIEKLSKYHLLKTEVSRLWNTQATVIPIVIGATGVVARSIRKYIDILDTNIDISILQKQAAIHTSIIISKVLGDTVFVHHTQPEQHTLRDNIAN

SEQ ID NO: 31964 - protein, 1045 aa, Lymantria dispar
MPKNTIKPKTDPPWKKRIANKIEKLRKELGQLIEVKRGITTRRMINIKNKLYEKYNIKNENDHNNTPETIKQKIKALAARIKRYEEMSGRKEHNQLFAENEHKLYRSLGNNNNTDIKLPTKEGLEEFWTSILSKPTKYNTQANWIKEVEESTNTIDTTNIEEITIEQVKTAVRKLLNWKTPGVDKIQNYYLKYLTSTHKYLSLLFTKIITGQETLEEWFTTGQVILIPKNSNTEEPKNWRPIACLPSIYKLLTSVLADILYSHCDSNNNIMAIEQRGCRRGARVCKDHLMVNKAILEDAHQAQKNLSMAWIDYQKAFDTVSHEWLLKVLDIYKCPPVIKSFLKWSMPAWKVIMTARGSHESITTEPIYIKRGIFQGDSLSPLLFCLAINPISFILNKYELKGYKLKDSFWINHLVYMDDLKIYANNKSNLKVLLDSVEIFTSDIGMRFGLDKCNVIHIRAGHRSTVTGEGHILLSQEKFKELEVGNSYKYLGIHESGKIEHSKIREQITKEYIKRVKKLIQTHLNARNIIKGINTYAIPVLLYSFGIINYKITDLKKIDTKTRKLLAIKKAHQLKAEVERLYLPIAQGGRGLINIEYMYKTQIVKYKQYLKTEFDDMIKAIVQHDINRGKYSIIKEAREIEQELHLPQDNLHTDTEIKQAIVKTQNTSWRAKQLHGQFPKKVLDQANINTELSFKWINKQHISPGIVSAVFAIQDQAVMTLQHQRDILRTAVDGKCRLCRVKDETAQHIISGCEKLAGTYYVKRHNNLVQYVYWCLAKKHKIEVSPLWWKETMIQPQVKENDTTKIMCETPVQTDITVTHNRPDLIYIDKINNKTFLIDISVPSDYNIGAKEIEKLSKYHLLKTEIGRLWNTQTAVIPIVVGATGVVAKSINTYLEKLNTTIDITILQKQAAIHSTTIISKVLGDTVFVNNANTQEEPAQNEQQTLNTQHSENTQLTTNTQDTNTTPDIPETVSGERGRRGNQTAHTQNTANTQITHTTQEESHTHRTDTQQTTHSNTRQGRTRGRGRRATPTTRTQHTRNRVGI

SEQ ID NO: 31965 - protein, 1374 aa, Lymantria dispar
METDNNETRIGPLPRGDRLGTSGTDAGRGSMRTVSGSLLNRRAGVGRTDDVTADQRGGEGADDALQSRASPTDSVGLSASTTIGNEDRRRKWSNKETAELLYCYFKARMAGPGYIRKLYTLFKDRNPNNPKVRKFDGNKLSNQARRIIKQNVISQEIQDRIKRQAEGTLTLAPTSTVYASNDNEHSDTSLNIHAITTSTSYASNDNEHTDTSPNVHAITTSTNTQQTHNSAEQAATIDELTSNIEVNEDQDPLILQFLQILAETKETTLADRLFLPKAKINKQFIDNLHTINKYIPNLLITNNDLISINHIIYATAKTLIINNNQTPFMPKNTIKPKTDPPWKKRIANKIEKLRKELGQFIEVKRGITTRRMINIKNKLYEKYNIKNENDHNNTAETIKQKIKALAARIKRYEEMSGRKEHNQLFAENEHKLYRSLGNNNQTNTDIKLPTKEGIEEFWTSILSKPTKYNTQANWIKEVEESTNTIDTTNIEEITIEQVKTAVRKLLNWKTPGVDKIQNYYLKYLTSTHKYLSLLFTKIITGQETLEEWFTTGQVILIPKNSNTEEPKNWRPIACLPSIYKLLTSVLADILYSHCDSNNIMAIEQRGCRRGARGCKDHLMVNKAILEDAHQAQKNLSMAWIDYQKAFDTVSHEWLLKVLDIYKCPPVIKSFLKWSMPAWKVIMTARGSHESITTEPIYIKRGIFQGDSLSPLLFCLAINPISFILNKYELKGYKLKDSFWINHLVYMDDLKIYAYNKSNLKVLLDSVEIFTSDIGMRFGLDKCNVIHIRAGHRSTVTGEGHILVSQEKFKELEVGNSYKYLGIHESGKIEHSKIREQITKECIKRVKKLIQTHLNARNIIKGINTYAIPVLLYSFGIINYKITDLKKIDTKTRKLLAIKKAHQQKAEVERLYLPIAQGGRGLINIEYMYKTQIVKYKQYLKTEFDDMIKAIVQHDINRDKYSIIKEAREIEQELHLPQDNLYTDTEIKQAIVKTQNTSWRAKQLHGQFPKKVLDQANINTELSFKWINKQHISPGIVSAVFAIQDQAVMTLQHQRNILRTAVDGKCRLCRVKDETAQHIISGCEKLAGTYYVKRHNNLVQYVYWCLAKKHKIEVSPLWWKETMIQPQVKENDTTKIMWETPVQTDITVTHNRPDLIYIDKINNKTFLIDISVPSDYNIGAKEIEKLSKYHLLKTEISRLWNTQTAVIPIVVGATGVVAKSINTYLEKLNTTIDITILQKQAAIHSTTIISKVLGDTVFVNNANTQEEPAQNEQQTLNTQHSENTQLTTNTQDTNTTPDIPETVSGERGRRGNQTAHTQNTANTQITHTTQEESHTHRTDTQQTTHSNTRQGRTRGRGRRATPTTRTQHTRNRVGI

SEQ ID NO: 31966 - protein, 1279 aa, Astraptes hopfferi
MPREGRTLETLRVRYTPMTNGALVTFVNMERQFRNRTLGPLPGGDRRGTSGADAGRDSMQAVSDSLLNRRARVGGPENTTAEQRGGEGTDDALQSRASPTDSVGSSVTTTNNTVSDDRRRKWSTEELQELMFCYFKARSDGSGYIERLHKLFSERNPNNPKIHKFNGNTLSNQARRIIKQNVISQELLDRIQKHAEGRNDVVDESCEQNEVEEEEETTIHNSHINITYNTNHIEYTIEQIQSIDQHAQNIEVNEDQDPLILNFLQILSETKESAIEDRQLLPKAKINKRFLENLSNLNKFISSILATNNSLREINDIIYAAAKTLIINNNQLPYTPKNTFKIKSDPPWKKRIQTKIEIFRKELGQLIEIGRGINTRRMIKIKDKLYRKYNIGNENEHSNIEEILKQKIKALAGRIKRYEDINSRKDQNSLFSENEHKLYRSLSGNSFKDIKLPDKEKVEEFWTSILSNPVHYNSEAKWIKKVEESTSEVNTTDIEEISEEHIKHAINKLLNWKTPGVDKIQNYYLKYLTSVHSYLSALFTKIVSRREALEDWFTTGQVILIPKNEQTEDPKNWRPIACLPTMYKLLSSVLSNILYDHCHQNNIIAIEQRGCRRGVRGCKDHLMVNKAILEDAHQSQKNLSMAWIDYQKAFDSVPHEWLAKVLDVYKCPPIIKRFLEIVMPTWRVIMTARGTQNSFNTEPIYVRRGIFQGDSLSPLLFCLAINPLSLLLNKYEMKGYKLKDSLWINHLLYMDDLKLYANNRHNLKVLLDSVEIFTRDIGMRFGLDKCNTIHISSGHRNTVTGEGHILLEGDIIKQLAIGDRYKYLGIHESGKIEHSIVRDQIIKEYFKRIKKLVNTYLNSRNLIKGINTYAIPVLLYSFGVINYKNSDLKKIDTKTRKLLAMKKAHQQKAEVERLYLPIAQGGRGLLNVEYMYKTQIIKYKQYLKAESDDLIKAIVEHDIRRDKYSIINEAQEIENQLHLTRGKIHTDKDIREAIVKRCKDIWRNKQLHGQFIKKVLDQTNIDTELSFKWIKKQQISPAIESSIFAIQDQSIMTRQHRRDILKEPIDGKCRLCASKDETTQHIISGCEKLAGNYYVKRHNNLVQYVYWCLAKKHKIEVSNLWWKETLTQPQVKENETAKILWEMPVQTDVTITHNRPDLIYTDKINNKTYLIDVTVPSDYNIGPKEIEKLSKYHLLKNEVSRLWKTQTTIIPIVVGATGIVGKNIKKYIEKLGTFIDISILQKQAAIHTSTILSKVLGDTVFVNSSQNNDRQNSEQPTHT

SEQ ID NO: 31967 - protein, 1237 aa, Ochropleura plecta
MERQRNSTRIGPLPGGERRGTSGADAGRDSIRTVSGSLLNRRARVGGPEDTTAEQGDGVDTDDALRSRASTPIENSAGSSRETIQDSNEDRRRKWSTEELRELMYCFFKAQSPGPGYINRLFTLFTDRNPTNPKIHKFNGNTLSNQARRVIKQNVLSQDLLNCIRDEAEGRVTETTEITNSMTGPNSTIDAPIIQRDLHTNTQHETNTNTQHSLEQAELIDQLTRNVTVTEDQDPLILSFLQVLAETKETPIKDRYLLPKAKINRHFVQNLHALNSYLPNLLITTDKLRELNNIIYAAAKTLILNNKQIPFIPKNVIKPISDPPWKKRIKNKIDKYRKELGQLIEIGRGVNTRRMNNIKTKLYNKYNIQSENERNNTEEILKQKIKALAGRIKRFEEISNRKEQNRLFNENEHRLYRSLGNNSTTFDIKLPSKESVEEFWKSILSKPIQYNKDAKWIEELEITSDKINTAELQEITVEQVKIAIRKLHNWKTPGIDKIHNYYLKYLTSTHQYLATAFTNIIEGKEQLEEWFTLGQVILISKNENTENAQNWRPIACLPSIYKLLTSILANQLYDHCQENNIMAIEQRGCRRGARGCKDHLMVNKAILEDAHQSAKNLSMAWIDYQKAFDSVSHEWLLRILEIYRCPPIIKTFLEIAMPTWKVIMSARGTNEFLTTDPIYIKRGIFQGDSLSPLLFCLAINPISLILSKYEMKGYKLKDSYWINHLLYMDDLKIYANNNSNLKVLLDSVEIFTNDIGMSFGLNKCNTIQIRSGHVNNTTGEGHILISGDTFEQLGMDRTYKYLGIHESGKIEHSKIREQVTKEYFKRTKKLLNTHLSSRNIIKGINTYAVPVLLYSFGIINYKNSDLKAIDTKTRKLLAIKKAQKQKADVERLYLPIVEGGRGLINAENMYKTQILKYKQYLERENDDLIKVIVQHDKNRDKYSIIKEAQEIERELQLTQNNIHTDKEIKEAIVKKQKEKWRNKQLHGQFPKAVLDQTNIDKENSLKWLKKQQISPSIESAIFAIQDQAINTRQHQRDIFKVNIDGKCRLCVNKDETTQHIISGCEKLAGTYYVKRHNNLVQYVHWCLAKKHNIDVSSLWWKEALTQPQVKENEQAKIMWEIPIQTDVTVTHNRHDLIYVDKTKNLTFLIDIAVPSDYNIGAKEIEKLSKYHLLKTEIRRLWNTQTAVIPIVIGATGIISKSLQRYIDQWGWQVKANLRWRCVRLFPMASVRHFFRSV

SEQ ID NO: 31968 - protein, 1372 aa, Lymantria dispar
METDNNETRIGPLPRGDRLGTSGADAGRGSMRTVSGSLLNRRAGVGRTEDVTADQRGGEGADDALQSRASPTDSVGSSASTTIGNEDRRRKWSNKETEELLYCYFKARMAGPGYIRKLYTLFKDRNPNNPKVRKFDGNKLSNQARRIIKQNVISQEIQDRIKRQAEGTLTLAPTNTVYASNDNEHSDTSLNIHAITTSTSYASNDNEHTDTSPNVHAITTSTNTQQTHNSAEQAATIDELTSNIEVNEDQDPLIIQFLQILAETKETTLADRLFLPKAKINKQFIDNLHTINKYIPNLLITNNDLISINHIIYATAKTLIINNNQTPFMPKNTIKPKTNPPWKKRIANKIEKLRKELGQLIEVKRGITTRRMINIKNKLYEKYNIKNENDHNNTAETIKQKIKALAARIKRYEEMSGRKEHNQLFAENEHKLYRSLGNNNNTDIKLPTKEGIEEFWTSILSKPTKYNTQANWIKEVEESTNTIDTTNIEEITIEQVKTAVRKLLNWKTPGVDKIQNYYLKYLTSTHKYLSLLFTKIITGQETLEEWFTTGQVILIPKNSNTEEPKNWRPIACLPSIYKLLTSVLADILYSHCDSNNIMAIEQRGCRRGARGCKDHLMVNKAILEDAHQAQKNLSMAWIDYQKAFDTVSHEWLLKVLDIYKCPPVIKSFLKWSMPAWKVIMTARGSHESITTEPIYIKRGIFQGDSLSPLLFCLAINPISFILNKYELKGYKLKDSFWINHLVYMDDLKIYANNKSNLKVLLDSVEIFTSDIGMRFGLDKCNVIHIRAGHRSAVTGEGHILLSQEKFKELEVGNSYKYLGIHESGKIEHSKIREQITKEYIKRVKKLIQTHLNARNIIKGINTYAIPVLLYSFGIINYKITDLKKIDTKTRKLLAIKKAHQQKAEVERLYLPIAQGGRGLINIEYMYKTQIVKYKQYLKTEFDDMIKAIVQHDINRDKYSIIKEAREIEQELHLPQDNLHTDTEIKQAIVKTQNTSWRAKQLHGQFPKKVLDQANINTELSFKWINKQHLSPGIVSAVFAIQDQAVMTLQHQRDILRTAVDGKCRLCRVKDETAQHIISGCEKLAGTYYVKRHNNLVQYVYWCLAKKHKIEVSPLWWKETMIQPQVKENDTTKIMWETPVQTDITVTHNRPDLIYIDKINNKTFLIDISVPSDYNIGAKEIEKLSKYHLLKTEISRLWNTQTAVIPIVVGATGVVAKSINTYLEKLNTTIDITILQKQAAIHSTTIISKVLGDTVFVNNANTQEEPAQNEQQTLNTQHSENTQLTVDTQDTNTTPDIPETVSGGRGRRGNQTAHTQNTANTQISHTTQEESHTHRTDTQQTTHPNTRQGRTRGRGRRATPTTRTQHTRNRVGI

SEQ ID NO: 31969 - protein, 1372 aa, Lymantria dispar
METDNNETRIGPLPRGDRLGTSGADAGRGSMRTVSGSLLNRRAGVGRTEDVTADQRGGEGADDALQSRASPTDSVGSSASTTIGNEDRRRKWSNKETEELLYCYFKARMAGPGYIRKLYTLFKDRNPNNPKVRKLDGNKLSNQARRIIKQNVISQEIQDRIKRQAEGTLTLAPTSTVYASNDNEHSDTSPIIHAITTSTSYASNDNEHTDTSPNIHAITTSTNTQQTHNSAEQAATIDELTSNIEVNEDQDPLILQFLQILAETKETTLADRLFLPKAKINKQFIDNLHTINKYIPNLLITNNDLISINHIIYATAKTLIINNNQTPFMPKNTIKPKTDPPWKKRIANKIEKLRKELGQLIEVKRGITTCRMINIKNKLYEKYNIKNENDHNNTAETIKQKIKALAARIKRYEEMSGRKEHNQLFAENEHKLYRSLGNNNNTDIKLPTKEGIEEFWTSILSKPTKYNTQANWIKEVEESTNTINTTNIEEITIEQVKTAVRKLLNWKTPGVDKIQNYYLKYLTSTHKYLSLLFTKIITGQETLEEWFTTGQVILIPKNSNTEEPKNWRPIACLPSIYKLLTSVLADILYSHCDSNNIMAIEQRGCRRGARGCKDHLMVNKAILEDAHQAQKNLSMAWIDYQKAFDTVSHEWLLKVLDIYKCPPVIKSFLKWSMPAWKVIMTARGSHESITTEPIYIKRGIFQGDSLSPLLFCLAINPISFILNKYELKGYKLKDSFWINHLVYMDDLKIYANNKSNLKVLLDSVEIFTSDIGMRFGLDKCNVIHIRAGHRSTVTGEGHILLSQEKFKELEVGNSYKYLGIHESGKIEHSKIREQITKEYIKRVKKLIQTHLNARNIIKGINTYAIPVLLYSFGIINYKITDLKKIDTKTRKLLAIKKAHQQKAEVERLYLPIAQGGRGLINIEYMYKTQIVKYKQYLKTEFDDMIKAIVQHDINRDKYSIIKEAREIEQELHLPQDNLHTDTEIKQAIVKTQNTSWRAKQLHGQFPKKVLDQANINTKLSFKWINKQHISPGIVSAVFAIQDQAVMTLQHQQDILRTAVDGKCRLCRVKDETAQHIISRCEKLAGTYYVKRHNNLVQYVYWCLAKKHKIEVSPLWWKETMIQPQVKENDTTKIMWETPVQTDITVTHNRPDLIYIDKINNKTFLIDISVPSDYNIGAKEIEKLSKYHPLKTEISRLWNTQTAVIPIVVGATGVVAKSINTYLEKLNTTIDITILQKQAAIHSTTIISKVLGDTVFVNNANTQEEPAQNEQQTLNTQHSENTQLTTNTQDTNTTPDIPETVSGERGRRGNQTAHTQNTANTQITHTTQEESHTHRTDTQQTTHSNTRQGRTRGRGRRATPTTRTQHTRNRVGI

SEQ ID NO: 31970 - protein, 1253 aa, Maniola jurtina
METINNRKRIGPLPGGERRGTSGADAGRSSMQTVSDSLLSRRAGVGEPEVSTADQIRGGEGTGDALQNRVSPTDSAGSTAMTTDENISDDKRRKWSIDELTELMFCYYKARADGSGYLARLQKLFTERNPNNPKIHKFNGNKLANQARTVLKHNIISKELLDRVQKQAEGVISTENPEPISNEEQIITPMQTHSTQQQQQNTHQVQHTQNTSEQAEIIDQLTRNIEVNEDQDPLIIQLLQTLAETKETPIEERLLLPKAKINKKFIDSLNLLNNYLPKLLITNNSLREVNNIIYASAKTLIVNNNQTPYAPKNTVKLKSDPPWKKRIQSKIDKLRKELGQLVEIQRGVNTLRMVKIKDRLYTKYNIQSENDHSNTAEIIKQKIKALAGRIKRYVDMNNRKEQNKLFNVNEHRLYRSLGSNGKKDIKVPNKQGLEEFWTSILSNPIEYNYEANWIKEIEHASREVITTDIQEITENQVKSALKKLLNWKSPGLDKIQNYYLKYLTSVHKYLALLFTNIVSGAERLEEWFTTGQVILIPKNENTEDPKNWRPIACLPTMYKLLTSVLADVMYSHCKENNIMAVEQRGCRRGARGCKDHLMTNKSILEDAHQSQKNLSMAWIDYQKAFDSVSHEWLLKLLDIYKCPTIIKRFLQLTMPFWRVIMTARGSQDSITTEPIYIRRGIFQGDSLSPFLFCLAINPLSFILNKYEMKGYKLKDSVWINHLLYMDDLKIYANNTNNLKVLIDSVEIFTNDIGMRFGLDKCNILHISSGCRSNAIGEGHILLSGETFEQLELGQKYKYLGVQESGKIEHNAIREQITKEYFKRVKKLLNTHLNSRNLIKGINTYAIPILLYSFGIINYKNSDLKKIDVKTRKMLAMKKAHMQKADVERLYLPVTEGGRGLINVEFMYKSQIVKYKQYLNEESDYLIKAIVQHDTHRDKYSIMKEAQEIERELHLQQKNIHTNKEIKDAIIKRHNEAWRSKQLHGQFPKKVLDQANLYKELSFKWMKRQQISPSIEASIFAIQDQAVMTRQHQRDILKEPVDGKCRLCATKDETTQHIISGCEKLAGTYYVKRHNNLVQYVYWCLAKKHNFEVSNLWWKEILTQPQVIENATAKILWEMPVQTDVTVTHNRPDLIYIDKNKNRTFLIDITVPSDYNIGPKEIEKLSKYHLLKTEVSRLWNTQATVIPIVIGATGVVARSIRKYIDILDTNIDISILQKQAAIHTSIIISKVLGDTVFVHNTQPEQHTLRDNIAN

SEQ ID NO: 31971 - protein, 1370 aa, Lymantria dispar
METDNNETRIGPLPRGDRLGTSGADAGRGSMRTVSGSLLNRRAGVGRTEDVTADQRGGERADDALQSRASPTDSVGSSASTTIGNEDRRRKWSNKETEELLYCYFKARMAGPGYIRKLYTLFKDRNPNNPKVRKFDGNKLSNQARRIIKQNVISQEIQDRIKRQAEGTLAPTSTVYASNDNEHSDTSLNIHAITTSTSYASNDNEHTDTSPNVHAITTSTNTQQTHNSAEQAATIDELTSNIEVNEDQDPLILQFLQILAETKETTLADRLFLPKAKINKQFIDNLHTINKYIPNLLITNTDLISINHIIYATAKTLIINNNQTPFMPKNTIKPKTDPPWKKRIANKIEKLRKELGQLIEVKRGITTRRMINIKNKLYEKYNIKNENDHNNTAETIKQKIKALAARIKRYEEMCGRKEHNQLFAENEHKLYRSLGNNNNRDIKLPTKEGIEEFWTSILSKPTKYNTQANWIKEVEESTNTIDTTNIEEITIEQVKTAVRKLLNWKTPGVDKIQNYYLKYLTSTHKYLSLLFTKIITGQETLEEWFTTGQVILIPKNSNTEEPKNWRPIACLPSIYKLLTSVLADILYSHCDSNNIMAIEQRGCRRGARGCKDHLMVNKAILEDAHQAQKNLSMAWIDYQKAFDTVSHEWLLKVLDIYKCPPVIKSFLKWSMPAWKVIMTARGSHESITTEPIYIKRGIFQGDSLSPLLFCLAINPISFILNKYELKGYKLKDSFWINHLVYMDDLKIYANNKSNLKVLLDSVEIFTSDIGMRFGLDKCNVIHIRAGHRSTVTGEGHILLSQEKFKELEVGNSYKYLGIHESGKIEHSKIREQITKEYIKRVKKLIQTHLNARNIIKGINTYAIPVLLYSFGIINYKITDLKKIDTKTRKLLAIKKAHQQKAEVERLYLPIAQGGRGLINIEYMYKTQIVKYKQYLKTEFDDMIKAIVQHDINRDKYSIIKEARDIEQELHLPQDNLHTDTEIKQTIVKTQNTSWRAKQLHGQFPKKVLDQANINTELSFKWINKQHISPGIVSAVFAIQDQAVMTLQHQRDILRTAVDGKCRLCRVKDETAQHIISGCEKLAGTYYVKRHNNLVQYVYWCLAKKHKIEVSPLWWKETMIQPQVKENDTTKIMWETPVQTDITVTHNRPDLIYIDKINNKTFLIDISVPSDYNIGAKEIEKLSKYHLLKTEISRLWNTQTAVIPIVVGATGVVAKSINTYLEKLNTTIDITILQKQAAIHSTTIISKVLGDTVFVNNANTQEEPAQNEQQTLNTQHSENTQLTADTQDTNTTPDIPETVSGGRGRRGNQTAHTQNTANTQISHTTQEESHTHRTDTQQTTHPNTRQGRTRGRGRRATPTTRTQHTRNRVGI

SEQ ID NO: 31972 - protein, 1372 aa, Lymantria dispar
METDNNETRIGPLPRGDRLGTSGADAGRGSMRTVSGSLLNRRAGVGRTEDVTADQRGGEGADDALQSRASPTDSVGSSASTTIGNEDRRRKWSNKETEELLYCYFKARMAGPGYIRKLYTLFKDRNPNNPKVRKFDGNKLSNQARRIIKQNVISQEIQDRIKRQAEGTLTLAPTNTVYASNDNEHSDTSLNIHAITTSTSYASNDNEHTDTSPNVHAITTSTNTQQTHNSAEQAATIDELTSNIEVNEDQDPLIIQFLQILAETKETTLADRLFLPKAKINKQFIDNLHTINKYIPNLLITNNDLISINHIIYATAKTLIINNNQTPFMPKNTIKPKTNPPWKKRIANKIEKLRKELGQLIEVKRGITTRRMINIKNKLYEKYNIKNENDHNNTAETIKQKIKALAARIKRYEEMSGRKEHNQLFAENEHKLYRSLGNNNNTDIKLPTKEGIEEFWTSILSKPTKYNTQANWIKEVEESTNTIDTTNIEEITIEQVKTAVRKLLNWKTPGVDKIQNYYLKYLTSTHKYLSLLFTKIITGQETLEEWFTTGQVILIPKNSNTEEPKNWRPIACLPSIYKLLTSVLADILYSHCDSNNIMAIEQRGCRRGARGCKDHLMVNKAILEDAHQAQKNLSMAWIDYQKAFDTVSHEWLLKVLDIYKCPPVIKSFLKWSMPAWKVIMTARGSHESITTEPIYIKRGIFQGDSLSPLLFCLAINPISFILNKYELKGYKLKDSFWINHLVYMDDLKIYANNKSNLKVLLDSVEIFTSDIGMRFGLDKCNVIHIRAGHRSTVTGEGHILLSQEKFKELEVGNSYKYLGIHESGKIEHSKIREQITKEYIKRVKKLIQTHLNARNIIKGINTYAIPVLLYSFGIINYKITDLKKIDTKTRKLLAIKKAHQQKAEVERLYLPIAQGGRGLINIEYMYKTQIVKYKQYLKTEFDDMIKAIVQHDINRDKYSIIKEARDIEQELHLPQDNLHTDTEIKQTIVKTQNTSWRAKQLHGQFPKKVLDQANINTELSFKWINKQHISPGIVSAVFAIQDQAVMTLQHQRDILRTAVDGKCRLCRVKDETAQHIISGCEKLAGTYYVKRHNNLVQYVYWCLAKKHKIEVSPLWWKETMIQPQVKENDTTKIMWETPVQTDITVTHNRPDLIYIDKINNKTFLIDISVPSDYNIGAKEIEKLSKYHLLKTEISRLWNTQTAVIPIVVGATGVVAKSINTYLEKLNTTIDITILQKQAAIHSTTIISKVLGDTVFVNNANTQEEPAQNEQQTLNTQHSENTQLTADTQDTNTTPDIPETVSGGRGRRGNQTAHTQNTANTQISHTTQEESHTHRTDTQQTTHPNTRQGRTRGRGRRATPTTRTQHTRNRVGI

SEQ ID NO: 31973 - protein, 1372 aa, Lymantria dispar
METDNNETRIGPLPRGDRLGTSGADAGRGSMRTVSGSLLNRRAGVGRTEDVTADQRGGEGADDALQSRASPTDSVGSSASTTIGNEDRRRKWSNKETEELLYCYFKARMAGPGYIRKLYTLFKDRNPNNPKVRKFDGNKLSNQARRIIKQNVISQEIQDRIKRQAEGTLTLAPTSTVYASNDNEHSDTSPIIHAITTSKSYASNDNEHTDTSPNIHAITTSTNTQQTHNSAEQAATIDELTSNIEVNEDQDPLIIQFLQILAETKETTLADRLFLPKAKINKQFIDNLHTINKYIPNLLITNNDLISINHIIYATAKTLIINNNQTPFMPKNTIKPKTNPPWKKRIANKIEKLRKELGQLIEVKRGITTRRMINIKNKLYEKYNIKNENDHNNTAETIKQKIKALAARIKRYEEMSGRKEHNQLFAENEHKLYRSLGNNNNTDIKLPTKEGIEEFWTSILSKPTKYNTQANWIKEVEESTNTIDTTNIEEITIEQVKTAVRKLLNWKTPGVDKIQNYYLKYLTSTHKYLSLLFTKIITGQETLEEWFTTGQVILIPKNSNTEEPKNWRPIACLPSIYKLLTTVLADILYSHCDSNNIMAIEQRGCRRGARGCKDHLMVNKAILEDAHQAQKNLSMAWIDYQKAFDTVSHEWLLKVLDIYKCPPVIKSFLKWSMPAWKVIMTARGSHESITTEPIYIKRGIFQGDSLSPLLFCLAINPISFILNKYELKGYKLKDSFWINHLVYMDDLKIYANNKSNLKVLLDSVEIFTSDIGMRFGLDKCNVIHIRAGHRSAVTGEGHILLSQEKFKELEVGNSYKYLGIHESGKIEHSKIREQITKEYIKRVKKLIQTHLNARNIIKGINTYAIPVLLYSFGIINYKITDLKKIDTKTRKLLAIKKAHQQKAEVERLYLPIAQGGRGLINIEYMYKTQIVKYKQYLKTEFDDMIKAIVQHDINRDKYSIIKEARDIEQELHLPQDNLHTDTEIKQAIVKTQNTSWRAKQLHGQFPKKVLDQANINTELSFKWINKQHISPGIVSAVFAIQDQAVMTLQHQRDILRTAVDGKCRLCRVKDETAQHIISGCEKLAGTYYVKRHNNLVQYVYWCLAKKHKIEVSPLWWKETMIQPQVKENDTTKIMWETPVQTDITVTHNRPDLIYIDKINNKTFLIDISVPSDYNIGAKEIEKLSKYHLLKTEISRLWNTQTAVIPIVVGATGVVAKTINAYLEKLNTTIDITILQKQAAIHSTTIIIKVLGDTVFVNNANTQEEPAQNEQQTLNTQHSENTQLTANTQDTNTTPDIPETVSGERGRRGNQKAHTQNTANTQITHTTQEESHTHRTDTQQTTHPNTRQGRTRGRGRRATPTTRTQHTRNRVGI

SEQ ID NO: 31974 - protein, 1313 aa, Phalera bucephala
MERQLSNERLGPLPGGDRRGTSGADAGRDSMQTVSDSLLNRRVRVGGPENITADQRGGEGTDGALQSRASPTDSVGSSETTTHMELSDDRRRKWSTDELKELMFCYFKARAGGPGYIGRLQELFAERNPNNPKIHKFNGNTLSNQARRVIKQNVISQELLNCIQKQAEVIIEVQNIPSSEQNVNEVEEHNTMSLHNTISQNIQHIESYTVEQAETIDNFTQNIQVNEDQDPLILNFLQILAETKETSVEDRLLLPKAKINRLFLENLNKINTYLPNILITNNSLRDINDIIYAAAKTLIINNNQTPYIPKNTIKAKTDPPWKRRIQFKIDTYRKELGQLIEIERGTNTRRMMNIKDKLYRKHNIRSENDHTNIVEILKQKVKALAGRIKRYDNINSRKEQNNLFHENEHKFYRSLGGNNIKEVKLPNKERVEEFWSSILSIPVQYNNEARWIQEVEVSSNEVNTTDIQEISEDQIKFAVRKLLNWKSPGIDKIQNYYIKYFTSVHSYLASLFTKIVTQRETLEEWFTTGQVILIPKNEHTEDPKNWRPIACLPTMYKLLTSVLANILYKHCHENNIMAVEQRGCRRGFRGCKDHLMVNKAILEDAHQSQKNLSMAWIDYQKAFDSVSHEWLIKVLDVYKCPPMIKKFLQLVMPAWRVIMTARGSQNSLTTEPITIRRGIFQGDSLSPLLFCLAINPLSFVLNKYEMKGYKLKDSFWINHLLYMDDLKIYANNKHNLKVLLDSVEIFTSDIGMRFGLDKCNIIHISSGHRSSVTGEGHILLNGEMVNQLAVGDRYKYLGVHESGKIEHSIIKDQLCKEYFKRLKKLLNTHLNSRCLIKGVNTYAIPVLLYSFGVINYKSSDLQKIDTKTRKLLAIKKAHQQKADVQRLYLPVAQGGRGLLNVEYIYKAQIVKYKQYLEAESDHLIKAIVEHDIHRDKYSVINEAKEIEGQLYLGRGVMHTDKQIKEAILKKHNEIWRSKQLHGQFPKKVLDQANIDTELSFKWIKKQQISPTIESSIFAIQDQAILTRQHQRDILKEPIDGKCRLCACKDETTQHIISGCEKLAGTYYVKRHNNLVQYVYWCLAKKHKIEVSNLWWKETLIQPQVKENEYTKILWEMPVHTDITVTHNRPDLIYVDKVNNKTYLIDITVPSDYNIGAKEIEKLSKYHLLKTEVSRLWNTQTTVIPIVIGATGIVAKSIKKYIDKLDTCIDISILQKQAAIHTSTILSKVLGDTVFVNNTHDSHIPNTEQSSHTQQATHTQPIAHTQQTSITQQLPSTPETSNTSHTQNTQRPPNTRQRNRRGRRRATFHTQQTP

SEQ ID NO: 31975 - protein, 1405 aa, Ebrietas anacreon
MANGAIAKPNKMERNYRSKRLGPLPGGDRRDTSAAGSGRVAGLASDSLLNRRAGVGDPEGGRDASNITAEHNAGDILRSRDHSPTCSAGASESTTLSIPEDARRRWSTEEMNELIYCYFRSRLMGVGYVKRLEALFKDRNPNNPKIGKFTGNNLATQARNIIARKVIPNEIIDSIRIRAESILITPNTDTVNDSPHGLSTSNNNNNNNNRQGTENTFINASHIQHSPQHTHTDSNVGRVSTTVITAEPVSEADENLGTDDRRRKWSDAEMRELMFCYYKARLGGPGYIKRLQKIFIERNPNNPKINRFDGYSLSTQARTIIKNNMLSQELLNRIKNLTEGVQEPIPTSTSTADDTSQITEHELPQQYSAEQSETINQAAQNISDSENADPIVLQFLNILSETREISIADRQHLPKAKINKQFIENCNKLNKYLPNLLEIHNTLRDINDILYAAAKTLIIFNKQSPFIPQTTVKPKKTPPWKKRIQGKVNKFRKELGQFVEIEKGVNSRRMIKIKERLYNKYRIHCIDELKNTIETLKQKIKALAARIKRYEEVNGRRDQNKMFGENQHRFYRSLGNTNDRDIQIPNKDNTEQFWTSIYSNPVQYNREAKWVEEEEILSNDIEINTLEEITTDQVKFAIRKLHNWKTPGIDKLQNYYLKYFTSTHKYLATLFTKIVKGEENLEEWFTTGQVILIPKSENTEQPKNWRPIACLPSMYKVLTSVLANVLYIHCSNNNILAVEQRGCRRGARGCKDHLMVNKAILEDAHQSQKNLSMAWIDYQKAFDSVSHAWLLKILDVYRCPHMIKNFLLMTMPSWKVVMTARGTHESITTEPISIRRGIFQGDSLSPLLFCLAINPLSNILNKYERKGYKLRDSFCINHLLYMDDLKLYANNKSNLRILIDSVEVFTKDIGMNFGLDKCNIVHINSGHINHTIGTGHVLLSGESFDQLAVGKTYKYLGINESGRIDHNTIREQITKEYYKRIKKLLNTYLSSRNIIKGINTYAIPVLLYSFGIINYKNSDLKKIDTKTRKLLNIKKAHQQKAEVERLYLPVLQGGRGLLNVEFMYKTQILKYKQYLKAEQDHLIKTIAQHDTGKDKYSILNEAIDIESEIQLKINDTHTDKDIKEAIHKTQCMRWRSKPLHGQFPKKVLDQANVDTKSSFRWLKNQQIPPTLEASVFAAQDQAVMTRQHQRDIVGQPIDGKCRLCACKDETTQHILAGCEKLAGTYYVKRHNNLVQYIYWCLARKHNIEVDRLWWKEKLTHPKTVENETAKIMWEIPIQTDVTVTHNRPDLVYVDKTTNNTYLIDITVPSDYNIGAKEVEKLSKYHLLKTELKRLWNTRTHVIPIVIGATGVVAKSLNRYIEKLNCNIDTTILQKQAAIHSITILSKVLGDTVFVTGAGETVSSLP

SEQ ID NO: 31976 - protein, 1334 aa, Emesis temesa
MKRQRKSTRNGPLPGGERRGTSGADAGRDSIRTVSGSLLNRRAGAGGPEDTTAEYRGGVGTDDALRSGASTPIEHTAGSSSETIENINDDRRRKWSEEEEKELMFCFFKAQSQGPGYINRLYTLFKDRNPTNPKIHKFNGNTLSNQARRIIKQNVISQELLNRIKGEAEGRLAANTETISNPTETDSSTNAPITQHNSHTTHEPSTTTQHTLSSDTQRSEEMDIIDQLNRSITVTEDQDPLVLNFLQVLAEIKETAIKDRLLLPKAKINRYFIQNLQTLNNFLPSLLISTHTLRDLNDIIYATAKTLILNNRQIPFVPKTSRKAASDPPWKKRIKSRIDKIRKELGQLIEIGRGVNTRRMNNIKAKLYSKYNVQQENDRINILETLKQKIKALAGRIKRYDESSQRKEQNRLFSENEHRLYRSLGKNNTTYDVKLPSKDSVEEFWKSILSNPVQYNTDARWIEEIELTSNQINTVESQDITEEQVKIAITKLHNWKTPGIDKIHNYYLKYLTSTHKYLAKVFSNIIAGQEEVEEWFTTGQVILIPKNEKTQDAKNWRPIACLPSIYKLLTSVLANQLYDHCQRNNIMAIEQRGCRRGARGCKDHLMINKAILEDAHQSQKNLSMAWIDYQKAFDSVSHEWLLKILDIYKCPPMIGAFLKAAMPTWKVVMTARGTNESLTTEPIYIKRGIFQGDSLSPLLFCLAINPISYILNKYEMKGYKLKDSFWVNHLLYMDDLKVYANNKYNLKILLDSIEIFTNDIGMKFGLSKCNTIHIRSGHRSNTSGDGHVLLSGEIFEQLGIDKTYKYLGIHESGKIEHSKIREQVTKEYFRRTKQLLNTHLNSRNIIKGINTYAIPVLLYSYGIINYKNSDLKAIDIKTRKLLAIKKAQQQKSDIERLYLPIIEGGRGLINIENMYKIQILKYKQYLENEYDDLIKVIVQHDKNRDKYSVIKEAREIERDFQIVHNNIHTDKEIKRAIIDKQKARWRNKHLHGQFPKAVLDQANIDKENSFKWLKKQPLAPSVESAIFAIQDQAVMTRQHQRDILKLDIDGKCRLCAIKDETTQHIISGCEKLAGAYYVKRHNNLVQYVYWCLARKHNIEVSNFWWKESLTQPQVKENEQAKIMWEIPIQTDVTVTHNRPDLIYVDKISNTTFLIDIAVPSDYNIGAKEIEKLSKYHLLKTEIRRLWNTKTSVIPIVVGATGIISKSIHRYIDQLNTKIDLTILQKQAAIHTTIILSKVMGDTVFVKTTPSNQGPATATQPTSDTVVSQETLDTQVSSTHTQQTIDTSTPDTQQTSHSENTQTCTTHNSPHNVNTHNQTLNSQRTSRIRTRARRR

SEQ ID NO: 31977 - protein, 1001 aa, Lymantria monacha
MINIKNKLYEKYNIKNENDHNNIAETIKQKIKALAARIKRYEEISGRKEQNQLFAENEHKLYRSLGNNNNSDIKLPTKEGIEEFWTSILSTPTKYNTQANWIKEVEETTNTIDTTNIEEITIEQVKTAIRKLLNWKTPGIDKIQNYYLKYLTSTHKYLSLLFTKIITGQEPLEEWFTTGQVILIPKNCNTAEPKNWRPIACLPSIYKLLTSVLADILYSHCDSNDIMSIEQRGCRRGARGCKDHLMVNKAILEDAHQSQKNLSMAWIDYQKAFDTVSHEWLLKVLDIYKCPPVIKRFLESSMPAWKVIMTARGSQESITTEPIYIKRGIFQGDSLSPLLFCLAINPISFILNKYELKGYKLKDSFWINHLVYMDDLKIYANNKSNLKVLLDSVEIFTSDIGMQFGFDKCNVIHIKAGHRSTVSGEGHILLSQEKFKELQVGDSYKYLGIHESGKIEHSKIREQITKEYTKRVKKLIQTHLNARNIIKGINTYAIPVLLYSFGIINYKITDLKKIDTKTRKLLAIKKAHQQKAEVERLYLPIAQGGRGLINVEYMYKSQIVKYKQYLKTEFDDMIRAIVQHDINKDKYSIIKESREIEQQLHLPQNNSHTDTEIKQAIVKTQNTSWRAKQLHGQFPKKVLDQANINTELSFKWIKKQHVSPGIVSAVFAIQDQAVMTLQHRRDILRAAVDGKCRLCRVKDETAQHIISGCEKLAGTYYVKRHNNLVQYVYWCLAKKHKIEVSPLWWKETMIQPQVKENDTTKIMWETPVQTDITVTHNRPDLIYVDKINNKTFLIDISVPSDYNIGAKEIEKLSKYHLLKTEISRLWNTQTAVIPIVVGATGVVAKSINTYLEKLGTTIDITILQKQAAIHSSTIISKVLGDTVFVNNTNTQQELAQNEQQASNTQQSENTQLTTNTQDTNITVDIPETVRGGRGRRSNQTAHTQNTANTQTTHTPEEERHTHRLDTQQTTNLNTRQGRIRGRGPRATSTTRTHHTRNRVGI

SEQ ID NO: 31978 - protein, 1262 aa, Emesis temesa
MTNGALVTFLNMKRQNFDLRQGSLPEGDRQGTSGAGAGRDSVQTVSGSQLSRRARVGEPEYTTAENWGWEGTDDALQSREMPQDSAGSPIMTINYKMNDDKRRKWSKEELHELMYCYFKAKSGGIGYIGRLQVIFKERNPNNPKIYKFTGNTLATQARRVIKQNLIAQELLDRIQVHAENNSEITTVSAQRNEIEEEEPIAWGPDFVYNRQQTKYATNRHTEQYTQHSYEDEDPIVLIFLQTLCEIKETAIENRLFLPKAKINRNFLENLRKLNQYLPHILPMNNSLREINNIIYAAAKTLIVNNNQTPYLPEKSLKVKTDPPWKKRIVAKIETFRRELGQLIEIDKGVNTRRMIKIRDRLYRKYKIQSNDEHKNVEEILKQKIKALAGRLRRYKDINARKEQNILFSENEHKFYRNLECNSHKEVKIPNKDNVEAFWSSILSKPTNYNRKAKWIKEIEASTKEVSTIDVQEITEEQIKLMSSKLMNWKTPGIDKIQNYYIKYLTSTHRYLASLFTKIINNQEQLEEWFTTGLVILIPKKDNTEDPRNWRPIACLPTIYKLFTSVLADILYNHCNENNILAIEQRGCRRAARGCKDHLLINKSILEDAHQFQKNLSMAWIDYQKAFDSVSHEWLVKTLDLYKCPLVIKKFLQLVMPSWQVIMTARGTESSVTTEAIPIKRGIFQGDSLSPLLFCLAINPLSFILNKYAMKGYKLKNSFSINHLLYMDDLKLYSNNKHSLQILLDSVEIFTGDIGMKFGLDKCNVVHINSGHRTRVTGEGHILLDGKVIKQLKEGDSYKYLGIHETGKIEHSNIKDKVIKEYFKRIKKLLNTHLNSRYLFKGINSYAIPVLLYTFGIINYKKSDLNKIDVKTRKLLTIKKAHQHKAEVNRLYLPITQGGRGLINVEYMYKAQIIKFKQYLKMENDNLIKAIVNHDIRKDKYSIIKESQEFENEINLKQENSLKDGNIKEAIFEKYNKTWRNKHLHGQFPKKILDTAHIDTELSFKWIKKHNVSPNVESSAFAMQDQAVTTRQYRRDIMKEPIDGKCRLCICKDETIQHIISGCKNLAGSYYVKRHNNLVQYVYWCLAKKHSIKVSNLWWKETLKQPQVEENETVKILWEFPIQTDITIVHNRPDLIYINKANNITYLIDITVPSDYNIGPKEIEKLSKYHLLKLEISRLWNTQTVIIPIVIGATGVVAKNLKKYTDQLDANIDITILQKQAVIHSSIIIGKVLGDCVFVNGQQIQATQNDTISSDLALDSHNN

SEQ ID NO: 31979 - protein, 946 aa, Ochropleura plecta
MNNIKTKLYNKYNIQSENERNNTEEILKQKIKALAGRIKRFEEISNRKEQNRLFNENEHRLYRSLGNNSTTYDIKLPSKESVEEFWKSILSKPIQYNKDAKWIEELEITSDKINTAELQEITVEQVKIAIRKLHNWKTPGIDKIHNYYLKYLTSTHQYLATAFTNIIEGKEQLEEWFTLGQVILIPKNENTENAQNWRPIACLPSIYNLLTSILANQLYDHCQENNIMAIEQRGCRRGARGCKDHLMINKAILEDAHQSAKNLSMAWIDYQKAFDSVSHEWLLRILEIYRCPPIIKTFLEIAMPTWKVIMSARGTNEFLTTDPIYIKRGIFQGDSLSPLLFCLAINPISLILSKYEMKGYKLKDSFWINHLLYMDDLKIYANNNSNLKVLLDSVEIFTNDIGMSFGLNKCNTIQIRSGHVNNTTGEGHILISGDTFEQLGIDRTYKYLGIHESGKIEHSKIREQVTKEYFKRTKKLLNTHLSSRNIIKGINTYAVPVLLYSFGIINYKNSDLKAIDTKTRKLLAIKKAQKQKADVERLYLPIVEGGRGLINAENMYKTQILKYKQYLEKENDDLIKVIVQHDKNRDKYSIIKEAQEIERELQLTQNNIHTDKEIKEAIVKKQKEKWRNKQLHGQFPKAVLDQTNIDKENSFKWLKKQQISPSIESAIFAIQDQAINTRQHQRDIFKVNIDGKCRLCVNKDETTQHIISGCEKLAGTYYVKRHNNLVQYVHWCLAKKHNIDVSSLWWKEALTQPQVKENEQAKIMWEIPIQTDVTVTHNRPDLIYVDKTKNLTFLIDIAVPSDYNIGAKEIEKLSKYHLLKTEIRRLWNTQTAVIPIVIGATGIISKSLQRYIDQLNTKIDITVLQKQAAIHTTIILSKVLGDTVFVHGTPRTQEPTTDTQHTVDSQQSSITQHLSSSRTPNTPMNSLTTQSTTNIRRRRGRRDRYE

SEQ ID NO: 31980 - protein, 1350 aa, Theope publius
MNNEEIRLGPLPGGDRRGTSGAGAGRDSMRTASDSLLNRRAGVGGSESITADRGGEGTDGALRSRVSPTNFAGSSVTTTENDVSDDKRRKWSTEELQELMFCFFKARLGGAGYIGRLHNIFSERNPSNPKIHKFNGNTLSNQARRVIKQNVLTQELLDRIQRQAEGILELEQIPEHNIIAEEPVVTPIYNITPQNTQNIDDITQQIENNLTNDIIVNEDQDPLILNFLQVLAETKETPIEERLLLPKAKINKQFLENLQTLNKYLPNLLVTNNSLQDLNNIIYATAKTLISNNNQKPYVCTLSTLKNKTDPPWKRRIRQKIESFRKELGQLIELGRGVETRRMTNIKVKLYSKYNIQCQNSHKNVEETLKQKIKALAGRLKRYEEINSRKEQNGLFKENEHRLYRSLESNGNRNIKLPSKETVEEFWSSILANPVAYNYNVNWIKEVELSAQGVNTEDKQEITEEEVKFAIRKLLNWKTPGIDKIQNYYLKYLTSTHRYLALIYTKIITRRETLEEWFTTGRVILIPKNEQTEDPKNWRPIACLPTMYKLLTSVLAEILYKHCDQNNIMAIEQRGCRRGARGCKDHLMLNKAILEDAHQSQRNLSMAWIDYQKAFDSVSHEWLVKVLEVYKCPPMIKNFLRLVMPQWKVIIAARGTETSLTTDPISVRRGIFQGDSLSPLLFCLAINPLSFVLNKYEMKGYKLKDSIWINHLLYMDDLKIYANHKYNLKVLLDSVEIFTNDIGMKFGLDKCNIIHLSSGYRSNVIGSGHILLSGETIKQLAIGDRYKYLGVHESGKIEHSVIKDQVKKEYFKRIKKLLNTHLNSRNLIKGINTFAVPVLLYSFGVINYKNNDLKKIDIKTRKLLAMKKVHQQKAEVERLYLPVSQGGRGLLSIEYMYKTQIVKYKQYLQAGYDDFIKAIVEHDRHRDKYSITKEARMIEIELELAQDSTHTDKSLKEATLKRCNKIWRNKHLHGQFPKRVLDQANIDTDLSFMWMKKQQISPSIESAIFAIQDQAIMTRQHQRDILKEPVDGKCRLCATKDETTQHIISGCEKLAGTYYVKRHNDLVKYVYWCIARKHGIKVSNLWWQETLVQPQVKENEFVKILWEIPIQTDITVLHNRPDLIYVDKINNKTYLIDITVPSDYNIGAKEIEKLSKYHLLRTEISRLWNTQATVIPIVVGATGVVAKNIIKYIEKLESNINICILQKQAAIHTTTIISKVLGDTVFVHNTDRPNTQHTQITLQSSDTQNVPQSFGIQDTLETSNTQQSLQTLSLSNTSANNIFIHDTQHTQITLQSSNTHPIHQATGTQTTIQSNDTQESQQSSILLSSIETQTLSGTRTRKRRQHISKS

SEQ ID NO: 31981 - protein, 1321 aa, Ortholexis melichroptera
MADPLWRMNRKNLDNWPLPGGDRRGTSGADAGRLSMRTVSGSLLNRRARVGGTEDATADQGDRGGADEALQSRASPTSSVGSSASTTTMKISDDRRRKWSTAELEELMLCFYKARAEGPGYIGRLEQLFKNRNPNNPKIHKFNGNTLSNQARRTIKQNVISQEVLNRLQLQAENAMPTVSTIENTTHVTQETQHTPIEPAIEVTTQELHEIQSTPDTQTTDIHNLEEARNIQVDDNQDPFILSFLQILAETKETPIEERQLLPKAKINKKFIENLNLLNKYLPNLLVFNDSLREINNILYATAKTLIVNNNQVPYTPKNIVKPKSDPPWKRRIQNKIETLRKELGQLTEIRRGVSSRRMSKIKLKIYTKYNIQNENDQDNVIEIIKQKIKALAGRIKRYETANNRKEQNKLFRENEHKLYRTLGKTSDNNVKTPDKEEVEKFWTSILSTPISYNTKAKWIKEVEISASDINTVNINTITEEHIKTATQKLLNWKTPGIDKIHNYYLKYVSSIHKYLASLYNKIISGQITIEEWFTTGQVILIPKNENTEEPKNWRPIACLCSMYKLLTSVLSNILHTHCDINKIMAVEQRGCRRGVRGCKDHLMVNKAVLEDAHQSQKNLSMAWIDYQKAFDSISHDWLLRILDIYKCPPIIKRFLQLTMPTWSVVMTARGSEHTITTGPIYIRRGIFQGDSLSPLLFCLAMNPLSFILNKYEMKGYKLNDFWINHLLYMDDLKIYANTKSNLKVLLDSVEIFTQDIGMKFGLDKCSTLHLSAGHRSHTVGEGHALLNGEVLKQLAIGEKYKYLGVHETGKIEHNIVRDQIKTEYFKRIKKLLHTHLNSRYLIKGINTYAIPVLLYSFGVINYKNSDLKKIDIKTRKLLALNKAHQQKAEVERLYLPVTQGGRGLINVESMYEVQIVKYKQYLKKYQDHLIEAIVQHDTQKDKYSILKEAEEIEIRLQLPRGNEHTDKDIREAIQRYRNKKWRDKQLHGQFPTKVLDQRNIDKDLSFKWTKKQQVSPSLESSIFAIQDQAIMTRQHQRDILREPVDGKCRLCAIKDETTQHLISGCDKLAGTYYVKRHNNLVQYVYWCLAKKNNIDVSNLWWKETMIQPQTKENSNTKLMWEIPVQTDITVTHNRPDIIYINKHTNHTYLIDVTVPSDYNIGAKEIEKLSKYHLLKTEISRLWNTQTTVIPIVIGATGVVAKSITRYIDKLNCNIDITILQKQAAIHTSIILSKVLGDTVFVHNTQPTQNTQHSSDIQHQSNTQQSSDTQHQSSTRQSSESHNPINTQHSINTIDSANTSQANTAQTRTRGSRRLNRRERR

SEQ ID NO: 31982 - protein, 1298 aa, Mimas tiliae
MERQINSKRIGPLPGGDRRGTSGADAGRDSMRTVSGSQLSRRARVGGPEGTTADQQGGEGTDDALQNRASPTDSVGSSVTTTDNAVSDDRRRKWSTEEIEELMFCYFKAKSGGSGYIGRLHNIFTERNPNNPKIHKFNGNTLSNQARRIIKQNVISKELLNLIQKRAEGAIIVPDTEIENTTQNVSVHTTQNTTLNTTVHYTQNTQQTDHITAAQAEEIEQLTENIVVNEDQNPLILNFLQIFAETKETPISERLLLPKAKINKHFIENLQTLNKYLPSLLVTNKSLREVNNIIYATAKTLIINNNQTPYLPKNTIKTKTDPPWKKRIQTKIEQLRKELGQLIEIERGISTSRMMRIRDNLYRKYNIQNDNDHKNTVETIKQKVQALAGRIKRYEDMNTKKEQNRLFNENEHRLYRSLGNSSNRNIQLPSKERVEEFWSSILSNPIPYNSEAKWIEEVETSSNEVNTINIEEITEEQVKLATRKLLNWKCPGIDKIQNYYIKYLTSTHSFLASLFTKIVTGVENLEEWFTTGQVILIPKNEQTEDPKNWRPIACLPTMYKLLTSVLTNILYSHCEENNILAPEQRGCRRGARGCKDHLMINKAILEDAHQSQKNVSMAWIDYQKAFDSVSHEWILRILDIYKCPPMIKAFLQMVMPMWRLIMTARGHQESITTEPISIRRGIFQGDSLSPLLFCLAINPLSCILNKYETKGYKLKDSITVNHLLYMDDLKVYTSNRQHLKIMLDSIEIFTSDIGMRFGLDKCNTLHINAGHRTDTMGEGHVLLSGDTIRQLAIGDRYKYLGVHESGKIEHSIIREQITKEYFKRVKKLLNTYLNSRYLIKGINTYAIPVLLYSFGIINYKNIDLRKIDIKTRKLLAIKKAHQQKAEVQRLYLPITDGGRGLFNIEYMYKTHILKYKQYLNTESDHLIKAIAQHDINRNKYSIIKKAQEVETELHLRQGHIHTDKEIKAAIVRNSNEVWRNKQLHGQFPKKVLDQANVDKELSFNWIKKQQIPPSVESSIFAMQDQAIMTRQHQRDILKESVDGKCRLCACKDETTQHIISGCEKLVGTYYVRRHNNLVQYVYWCLAKKHQMDVSNLWWKETLIQPQVKENDTAKILWEMPVQTDITVTHNRPDIIYIDKINNKTYLIDISVPSDYNIGPKEIEKLSKYHLLKTEVTRLWKTQTTVVPVVIGATGVVAKSLKKYIDKLDTNINISILQKQAAIQSSVILSKVLGDTVFVNSTQNQHTQNMQQSPDTQQSFSTLHSTNTTNTQPSTINRSNRGRGRRNVRACRQLIVNSQ

SEQ ID NO: 31983 - protein, 1298 aa, Mimas tiliae
MERQINSKRIGPLPGGDRRGTSGADAGRDSMRTVSGSQLNRRARVGEPEGTTADQQGGEGTDDALQNRASPTDSVGSSVTTTDNAVSDDRRRKWSTEEIEELMFCYFKAKSGGPGYIGRLHNIFTERNPNNPKIHKFNGNTLSNQARRIIKQNVISKELLNLIQKRAEGAIIVPDTEIENTTQNVSVHTTQNTTMNTTVHNTQNTQQTDHITAAQAEEIEQLTENIVVNEDQNPLILNFLQILAETKETPISERLLLPKAKINKHFIENLQTLNKYLPSLLVTNKSLREVNNIIYATAKTLIINNNQTPYLPKNTIKTKTDPPWKKRIQTKIEQLRKELGQLIEIERGISTSRMMRIRDNLYRKYNIQNDNDHKNTVETIKQKVQALAGRIKRYEDMNTKKEQNTLFNENEHRLYRSLGNSSNRNIQLPSKERVEEFWSSILSNPIPYNSEAKWIEEVETSSNEVNTINIEEITEEQVKLATRKLLNWKCPGIDKIQNYYIKYLTSTHSFLASLFTKIVTGVENLEEWFTTGQVILIPKNEQTEDPKNWRPIACLPTMYKLLTSVLTNILYSHCEENNILAPEQRGCRRGARGCKDHLMINKAILEDAHQSQKNLSMAWIDYQKAFDSVSHEWILRILDIYKCPPMIKAFLQMVMPMWRLIMTARGHQESITTEPISIRRGIFQGDSLSPLLFCLAINPLSCILNKYETKGYKLKDSITVNHLLYMDDLKVYTSNRQHLKIMLDSIEIFTSDIGMRFGLDKCNTLHINAGHRTDTTGEGHVLLSGDTIRQLAIGDRYKYLGVHESGKIEHSIIREQITKEYFKRVKKLLNTYLNSRYLIKGINTYAIPVLLYSFGIINYKNIDLRKIDIKTRKLLAIKKAHQQKAEVQRLYLPITDGGRGLLNIEYIYKTHILKYKQYLNTESDHLIKAIAQHDINRNKYSIIKEAQEVETELHLRQGHIHTDKEIKAAIVRNSNEVWRNKQLHGQFPKKVLDQANVDKELSFNWIKKQQIPPSVESSIFAIQDQAIMTRQHQRDILKESVDGKCRLCACKDETTQHIISGCEKLVGTYYVRRHNNLVQYVYWCLAKKHQMDVSNLWWKETLIQPQVKENDTAKILWEMPVQTDITVTHNRPDIIYIDKINNKTYLIDISVPSDYNIGPKEIEKLSKYHLLKTEVTRLWKTQATVVPVVIGATGVVAKSLKKYIDKLDTNINISILQKQAAIQSSVILSKVLGDTVFVNSTQNQHTQNMQQSPDTQQSFSTLHSTNTTNTQPSTINRSNRGRGRRNVRACRQLIVNSQ

SEQ ID NO: 31984 - protein, 1328 aa, Ennomos quercinarius
MESRNNVERIGPLPGGDRRGTFGADAGRDSMQTVSGSLLSRRARVGEPENTTADQRGGEGADDALQDRASPTNSAGSSATTTNYAVNDDRRRKWSTEELQELMFCYFKARSEGPGYIGRLEALFTERNPNNPKIHKFNGNTLSNQARRVIKQNVISQELLDRLQKQAEGIMPTETPELILNETVTHDTTPTQILHITQPTPEQSETIDQLTNNIEVNEDQDPLVLQFLQILAETKETPIAERLVLPKAKINKRFIENLNTLNKYLPNLLITNNTLREINDIIYATAKTLIISNNQTPFMPKNIIKPKTDPPWKKRIQTKIEKFRKELGHLVEIQRGTNTRRMRKIKDKIYSKYNIQNENDHNNITETIKQKVKALAGRIKRYEEMNTKKEQNKLFGENEHRLYRSLDSKSNSEIKIPSKEGVEEFWKSILSNPEQYNTDAKWITEVENSFSEVNTADIEEITEDQVKHAIRKLLNWKSPGIDKIQNYYLKYLTSVHKYLATLFTNIVSGTETFEEWFTTGQVILIPKNENTEDPKSWRPIACLPSMYKLLTSVLANILYSHCHENSIMAIEQRGCRRGARGCKDHLMVNKAILEDAHESQKNLSMAWIDYQKAFDSVSHEWLLKILDVYKCPALIKRFLLLAMPSWRVIMTARGSQDSITTEPIYIRRGIFQGDSLSPLLFCLAINPLSFILNKYEMKGYKLKDSFWINHLLYMDDLKVYANNRTNLKVLLDSLEIFTSDIGMRFGLDKCNIIHISSGHRSNVTGEGHILLSGETIKQLAIGDRYKYLGVHESGKIEHNIIREQITKEYFKRVKKLMNTHLNSRNLVKGINTYAIPVLLYSFGVINYKNNDLKKIDVKTRKLLAIKKAHQQKAEVERLYLPVNQGGRDLLNVEYMYKTQIVKYKQYLEPKSDHLIEAIVQHDTHRDKYSIMKEAQEIERELHLAVDSRHTDEEIKKAIVKRRNETWRNKQLHGQFPKKVLDQANIDKELSFKWIKKQQISPSIESSIFAIQDQAVMTRQHQRDILKEPVDGKCRLCACKDETTQHIISGCEKLAGTYYVKRHNNLVQYVYWCLAKKHKIEVANLWWKETLVQPQVKENDTTKILWEIPIQTDVTVTHNRPDLIYIDKTNNKTFLIDITVPSDYNIGAKEIEKLSKYHLLKTEISRLWHTQATVIPIVVGATGTVAKSIKKYIDKLDATIDISILQKQAAIHTTTILSKVLGDTVFVHNIPTDQNVLNTQQVSTTQQSSDILDPSNITQTSNTQQSSTTQQTSDTQGPSNTTQISDTQQSSTTQQSSDTPDPSNISRTSNTQQRREQRLGRGRRRRINT

SEQ ID NO: 31985 - protein, 1301 aa, Euproctis similis
MESVNNVSSIGPLPGGDRRGTSGAGAGRSRHTNRQRLSAEQAGESRGTRSYYSRTTGREGADDALQSRASPTHSVGSSASTTNYANDDRRRKWSTEEIEELMYCYYKARSAGPGYIRTLFTLFKDRNPNNPKVNRFDGNKLSNQARRIIKQNVISQELLNRIQQTAEGSSSSLNENIPNEVQEPNIGYIVDTNIQQIDTHQERNTQDAELINELTSNIQVHEDQDPLILNFLQTLAETKETPVTNRLFLPKAKINKQFLRNLKTINDFLPNILVTSNNLLDINNIIYATAKTLILNNKQTPFKPKNTINPKSNPPWKKRIQIKIEKFRKELGQLIEIKRGIGTRRMIKIKEKLYAKYNICSENDHDNTSETLKQKIKALAARIKRYEDMNNRKNQNKLFSENEHKLYRSLGNNIDREIKLPTKERLEEFWTSVLSNSTQYNTDAKWIKELESSVNTVETVDMVEITLEHIKTATKKLLNWKTPGIDQIQNYYLKYLTSIHTHLAKLFTNIVLGNENLEEWFTTGQVILIPKNNNNEDPKNWRPIACLCSIYKLLTSVLADVLYKHCQDNHIIAIEQRGCRRGARGCKDHLMVNKAILEDAHQSQKNLSMAWIDYQKAFDTVSHQWLLRVLDIYKCPPMIKRFLQLSMPSWRVVMTARGSQEIVTTEPIYIRRGIFQGDSLSPLLFRLAVNPVSFILNKYELKGYKLKDSFWINHLLYMDDLKIYANNKNNLKVLLDSVETFTNDIGMSFGLDKCNVAHISAGHRNTATGEGHILLSGESFKQLAIGDRYKYLGIHESGKIEHAIIRDQITKEYFKRVRKLLQTHLSARNIIKGINTYAIPVLLYSFGIINYKINDIKKIDTKTRKLLAIKKAHQQKAEVGRPEGPGRPDIPVSDGGRGLINVEYIYKSQIVKYKQYLDTEFDDLIRAIVRHDIHRDKYSIQKDAKEIEREIQLPHNRQPTDTDIKNAILKIQHSSWRLKQLHGQFPTKVLDQANIDTELSFKWLKKQQVSPGIESAVFAIQDQAVMTRQHQRDILKLPVDGKCRICQIKDETAQHIISGCEKLAGNYYVKRHNNLVQYVYWCLARKHNVEVSPLWWKENMIQPQVKETESAKILWEMPVQTDITVTHNRPDLIYVDKVNNKTFLIDITVPSDYNIGAKEIEKLSKYHLLKTEVSRLWNTQTTIIPIVVGATGVVAKSITKYIEKLEAPIDISILQKQAAIHTTTILSKVLGDTVFVQNINTIQHHTPTVPLINPPTDPQLNANTQRSNSHTIIATQEPERSRGRGRGRGRGRGRGRGSRIP

SEQ ID NO: 31986 - protein, 1301 aa, Euproctis similis
MESVNNVSSIGPLPGGDRRGTSGAGAGRSSHTNRQRLSAEQAGESRGTRSYYSRTTGREGADDALQGRASPTHSVGSSASTTNYANDDRRRKWSTEEMEELMYCYYKARSAGPGYIRTLFTLFKDRNPNNPKVNRFDGNKLSNQARRIIKQNVISQELLNRIQQTAEGTSPSLNENIPNEVQVPNIDYIVDTDTPQFDTHQEQYTPDVDLINELTSNIQVHEDQDPLILNFLQTLAETKETPVTNRLFLPKAKINKQFLRNLKTINDFLPNILVTNNNLLDINNIIYATAKTLILNNKQTPFKPKNTINPKSNPPWKKRIQIKIEKFRKELGQLIEIKRGIGTRRMIKIKEKLYAKYNICSENDHDNTSETLKQKIKALAARIKRYEDMNNRKNQNKLFSENEHKLYRSLGNNIDREIKLPTKERLEEFWTSVLSNSTQYNTDAKWIKELESSVNTVETIDTVEITLEHIKTATKKLLNWKTPGIDQIQNYYLKYLTSIHTHLAKLFTNIVLGNENLEEWFTTGQVILIPKNNNNEDPKNWRPIACLCSIYKLLTSVLADVLYKHCQENHIIAIEQRGCRRGARGCKDHLMVNKAILEDAHQSQKNLSMAWIDYQKAFDTVSHQWLLRVLDIYKCPPMIKRFLQLSMPSWSVVMTARGSKEIVTTEPIYIRRGIFQGDSLSPLLFCLAVNPVSFILSKYELKGYKLKDSFWINHLLYMDDLKIYANTKNNLKVLLDSVETFTNDIGMSFGLDKCNVAHISAGHRNTATGEGHILLSGETFKQLAIGDRYKYLGIHESGKIEHSIIRDQITKEYFKRVRKLLQTHLSARNIITQQNHTYAIPVLLYSFGIINYKNNDLKKIDTKTRKLLAIKKAHQQKAEVERLYIPVADGGRGLINVEYIYKSQIVKYKQYLDTESDHLIKAIARHDIHRDKYSIKNDAKEIEREIQLPHNRQHTDTDIKNAIVKKQNSSWRLKQLHGQFPTKVLDQANIDTELSFKWLKKQHVSPGIESAVFAIQDQAVMTRQHQRDILKVPVDGKCRICQIKDETAQHIISGCEKLAGNYYVKRHNNLVQYVYWCLARKHNIEVSPLWWKENMIQPQVKENESAKILWEMPIQTDITVTHNRPDLIYVDKANNKTFLIDITVPSDYNIGAKEIEKLSKYHLLKTEVSRLWNTQTTIIPIVVGATGIVAKSLTRYIEKLETPIDISILQKQAAIHTTTILSKVLGDTVFVQNTDTLQQHTPTAPLINPPTDPQQNASTQRPHITTHTQDSISDTINTTQETERGRGRGRGRGRGRGRRTP

SEQ ID NO: 31987 - protein, 1017 aa, Oxynetra semihyalina
MIKIKDKLYRKHNIQNENDHKIIEVILTQKIKALASRIKRYEKIASTKEQNKAFSESEHKFYRNLGGNNFQDIKLPSKKTVEEFWSALLSNPIQYNHEAQWIKEVEISSNKVTTTDITEISEEHIQYAIRRLLNWKSPGIDKIQNYYLKYLTGIHSFLASLFTKIINHQESLDDWFTTGQVILIPKNEHTDDPKNWRPITCLPTMYKLLTSVLSNILYNHCHQNNIMSIEQRGCRRGVRGCKDLLMVNKAILEDAHQSQKNLSMAWIDYQKAFDSVSHAWLTKVLDIYKCPPIIKRFLELVMPLWKVIMTARGTQNSLTTKPISIRRGIFQGDSLSPLLFCLAINPLSFVLRKYEMKGYKLKESIWINHLLYMDDLKIYANNTYNLRVLLDSVEIFTNDIGMKFGLDKCNTLHISSGHRSNLRGEGHVLLGGDIIKQLAVGDRYKYLGIHESGKIDHSIIKDQITKEYFKRIKRLLNTHLKSRYLIKGMNTYAIPVLSYSFGIINYKNNDLKKIDTKTRKLLAIKKAHHQKSEVERLYLPLSKGGRGLCNVEYMYKTQIVKYKQYLQAEADDLLKAIVEHDIHRDKYSIIKEGQEIENNLHLAQGCIHTDKNIEEAIVKMQNDRWRTKQLHGQFPKKVLDLKNIHTEMSFNWLKKQQIPPSIESTIFAIQDQAVMTRQHQRDILKSEIDGKCRLCACKDETAQHIISGCEKLAGTYYVKRHNSLVLYVLWCLARKHKIDVAKLWWQETLTQPQKLENNFAKILWEMPVQTDITVTHNRPDIIYMDKENNKTYLIDVSVPSDYNIGAKEIEKLSKYHLLKTEITRLWNTHTMVIPIIIGATGIVAKSINKYKQSLNANIDTSILQKQAAIHTHLILSKVLGDTVFVHNTQDTNTETTRIVHLTTTQPSPNIPISQNSANIQSPSTTQQNVIHLIPNTIIPPVTTNGETPSTAQPTITQPALNTATTPETTSMPGTEITSTTQQKKEKRGNRKTSAHNTQHTLAQTSQIINIMRLRPRK

SEQ ID NO: 31988 - protein, 1313 aa, Phalera bucephala
MERQLSNERLGPLPGGDRRGTSGADAGRDSMQTVSDSLLNRRVRVGGPENITADQRGGEGTDGALQSRASPTNSVGSSETTTHMELSDDRRRKWSTDELKELMFCYFKARAGGPGYIGRLQELFAERNPNNPKIHKFNGNTLSNQARRIIKQNVISQELLNCIQKQAEGIIEVQNIQSSEQNVNEVEEHNTMSLHNTISQNTQHIESYTVEQAETIDNFTQNIQVNEDQDPLILNFLQILAETKETSVEDRLLLPKAKINRLFLENFNKINTYLPNILITNNSLRDINDIIYAAAKTLIINNNQTPYIPKNTIKAKTDPPWKRRIQFKIDTYRKELGQLIEIERGTNTRRMMNIKDKLYRKHNIQSENDHRNIVEILKQKVKALAGRIKRYDNINSRKEQNNLFHENEHKFYRSLGGNNIKEVKLPNKERVEEFWSSILSIPVEYNNEARWIQEVEVSSNEVNTTDIQEISEDQIKFAVRKLLNWKSPGIDKIQNYYIKYFTSVHSYLASLFTKIVTQRETLEEWFTTGQVILIPKNEHTEDPKNWRPIACLPTMYKLLTSVLANILYKHCHENNIMAVEQRGCRRGVRGCKDHLMVNKAILEDAHQSQKNLSMAWIDYQKAFDSVSHEWLIKVLDVYKCPPMIKKFLQLVMPAWRVVMTARGSQNSLTTEPITIRRGIFQGDSLSPLLFCLALNPLSFVLNKYEMKGYKLKDSFWINHLLYMDDLKIYANNKHNLKVLLDSVEIFTSDIGMRFGLEKCNIIHISSGHRSSVTGEGHILLNGEMINQLAVGDRYKYLGVHESGKIEHSIIKDQLCKEYFKRLKKLLNTHLNSRCLIKGVNSYAIPVLLYSFGVINYKSSDLQKIDTKTRKLLAIKKAHQQKADVQRLYLPVAQGGRGLLNVEYMYKAQIIKYKQYLEAESDHLIKAIVEHDIHRDKYSVINEAKEIEGQLYLGRGVMHTDKQIKEAILKKHNEMWRSKQLHGQFPNKVLDQANIDTELSFKWIKKQQISPTIESSIFAIQDQAILTRQHQRDILKEPIDGKCRLCACKDETTQHIISGCEKLAGTYYVKRHNNLVQYVYWCLAKKHKIEVSNLWWKETLLQPQVKENEYTKILWEMPVHTDVTVTHNRPDLIYVDKVNNKTYLIDITVPSDYNIGAKEIEKLSKYHLLKTEVSRLWNTQTTVIPIVIGATGIVAKSIKKYVDKLDTCIDISILQKQAAIHTSTILSKVLGDTVFVNNTQDFHIPNTEQSTHTQQATHTQPIAHTQQTSITQQLSSTPETSNTSHTQNTQRPPNTRQRNRRGRRRATFHTQQTP

SEQ ID NO: 31989 - protein, 1313 aa, Phalera bucephala
MERQLSNERLGPLPGGDRRGTSGADAGRDSMQTVSDSLLNRRVRVGGPENITADQRGGEGTDGALQSRASPTNSVGSSETTTHMELSDDRRRKWSTDELKELMFCYFKARAGGPGYIGRLQELFAERNPNNPKIHKFNGNTLSNQARRIIKQNVISQELLNCIQKQAEGIIEVQNIQSSEQNVNEVEEHNTMSLHNTISQNTQHIESYTVEQAETIDNFTQNIQVNEDQDPLILNFLQILAETKETSVEDRLLLPKAKINRLFLENFNKINTYLPNILITNNSLRDINDIIYAAAKTLIINNNQTPYIPKNTIKAKTDPPWKRRIQFKIDTYRKELGQLIEIERGTNTRRMMNIKDKLYRKHNIQSENDHRNIVEILKQKVKALAGRIKRYDNINSRKEQNNLFHENEHKFYRSLGGNNIKEVKLPNKERVEEFWSSILSIPVEYNNEARWIQEVEVSSNEVNTTDIQEISEDQIKFAVRKLLNWKSPGIDKIQNYYIKYFTSVHSYLASLFTKIVTQRETLEEWFTTGQVILIPKNEHTEDPKNWRPIACLPTMYKLLTSVLANILYKHCHENNIMAVEQRGCRRGVRGCKDHLMVNKAILEDAHQSQKNLSMAWIDYQKAFDSVSHEWLIKVLDVYKCPPMIKKFLQLVMPAWRVVMTARGSQNSLTTEPITIRRGIFQGDSLSPLLFCLALNPLSFVLNKYEMKGYKLKDSFWINHLLYMDDLKIYANNKHNLKVLLDSVEIFTSDIGMRFGLEKCNIIHISSGHRSSVTGEGHILLNGEMINQLAVGDRYKYLGVHESGKIEHSIIKDQLCKEYFKRLKKLLNTHLNSRCLIKGVNSYAIPVLLYSFGVINYKSSDLQKIDTKTRKLLAIKKAHQQKADVQRLYLPVAQGGRGLLNVEYMYKAQIVKYKQYLEAESDHLIKAIVEHDIHRDKYSVINEAKEIEGQLYLGRGVMHTDKQIKEAILKKHNEMWRSKQLHGQFPNKVLDQANIDTELSFKWIKKQQISPTIESSIFAIQDQAILTRQHQRDILKEPIDGKCRLCACKDETTQHIISGCEKLAGTYYVKRHNNLVQYVYWCLAKKHKIEVSNLWWKETLLQPQVKENEYTKILWEMPVHTDVTVTHNRPDLIYVDKVNNKTYLIDITVPSDYNIGAKEIEKLSKYHLLKTEVSRLWNTQTTVIPIVIGATGIVAKSIKKYVDKLDTCIDISILQKQAAIHTSTILSKVLGDTVFVNNTQDFHIPNTEQSTHTQQATHTQPIAHTQQTSITQQLSSTPETSNTSHTQNTQRPPNTRQRNRRGRRRATFHTQQTP

SEQ ID NO: 31990 - protein, 1369 aa, Oxynetra hopfferi
MANGALVTCMNMERQKVKRKYRQRPLPGDDRRGTSGADAGRSSMQTVSGSLLNRRARVGEPENITADQRGGKRTDDALQSRAMPTDSVGSSVATTNNAISDDRRRKWSTEELHELMFCYFRTRHEGPGYIGRLHKLFSERNPNNPKIHKFTGNTLSNQARRVIKQNVISQELLDRIQKQAEGTEEVLENSEQNLIEQEQIINIFYSTIGQKTPHTEYSSEQAHIIDQLTQNVQVNEDRDPLILNFLQILSETKETPIAERQFLPKAKVNKRFIENLNILNKYLPNILISNYSLRDINNIIYAAAKTLIINNNQSPYMPKNNYKIKSEPPWKKRIKTKIEIFRKELAQLIELNRGIKTPRMMKIKDKLYRKHNIQNENDHKNIEEILTQKIKALAGRIKRYDKIATTKEQNKLFSESEHKLYRNLGSNNLQDIKLPSKKTVEEFWSALLSNPIQYNHEAQWIKEVEISSNKVTTTDITEISEEHIQYAVRRLLNWKSPGIDKIQNYYLKYLTEIHRFLASLFTKIIAHQEPLDDWFTTGQIILIPKNEHTEDPKNWRPIACLPTMYKLLTSVLYNILYNHCHQNNIISIEQRGCRRGVRGCKDHLMVNKAILEDAHQSQKNLSMAWIDYQKAFDSVSHAWLTKVLDVYKCPPIIKRFLELVMPLWKVIMTARSTQNSLTTKPISIRRGIFQGDSLSPLLFCLAINPLSFVLSKYEMKGYKLKESIWINHLLYMDDLKIYANNTYNLKVLLDSVEIFTNDIGMKFGLDKCNTLHISSGHRSNMRGEGHVLLGGDIIKQLPVGDRYKYLGIHESGKIDHSIIKDQITKEYFKRIKRLLNTHLNSRYLIKGINTYAIPVLSYSFGIINYKNNDLKKIDTKTRKLLAIKKAHHQKSEVQRLYLPLCEGGRGLCNVEYMYKTQIVKYKQYLQAVADDLVKAIVEHDIHRDKYSIIKEAQEIEDNLHLAQGSIHAHKDIKEAIVKMQNDRWRTKQLHGQFPKKVLDLKNIDTEMSFNWLKKQQIPPSIESTIFAIQDQAVMTRQHQRDILKSEIDGKCRLCACKDETAQHIISGCEKLAGTYYVKRHNNLVQYVLWCLARKHKIEVAKLWWQETLTQPQKLENNFAKILWEIPVQTDITVTHNRPDIIYMDKENNKTYLIDVSVPSDYNIGAKEIEKLSKYHLLKTEITRLWNTHTTVIPIIIGATGIVAKSINKYKQSLNANIDISILQKQAAIHTSLILSKVLGDTLFVHNTQDTNTETIRIVHQTTTQPSPNIPISQNTASIQLSSATQQNDIHIIPNAIIPPVTTNGETPSTAQPTITQPALNTTTTITEITSSTRQKREKRGNRKTPAHNTQNAPAHLHTSQNKMRLRPRK

SEQ ID NO: 31991 - protein, 1289 aa, Mimas tiliae
MERQINSKRIGPLPGGDRRGTSGADAGRDSMRTVSGSQLSRRARVGGPEGTTADQQGGEGTDDALQNRASLTDSVGSSVTTTDSAVSDDRRRKWSTEEIEELMFCYFKAKSGGPGYIGRLHNIFTERNPNNPKIHKFNGNTLSNQARRIIKQNVISKELLNLIQKRAEGAIIVPDTEIENTTQNVSVHTTQNTTMNTTVHNTQNTQQTDHITAAQAEEIEQLTENIVVNEDQNPLILNFLQILAETKETPISERLLLPKAKINKHFIENLQTLNKYLPSLLVTNKSLREVNNIIYATAKTLIINNNQTPYLPKNTIKTKTDPPWKKRIQTKIEQLRKELGQLIEIERGISTSRMMRIRDNLYRKYNIQNDNDHKNTVETIKQKVQALAGRIKRYEDMNTKKEQNRLFNENEHRLYRSLGNSSNRNIQLPSKERVEEFWSSILSNPIPYNSEAKWIEEVETSSNEVNTINIEEITEEQVKLATRKLLNWKCPGIDKIQNYYIKYLTSTHSFLASLFTKIVTGVENLEEWFTTGQVILIPKNEQTEDPKNWRPIACLPTMYKLLTSVLTNILYSHCEENNILAPEQRGCRRGARGCKDHLMINKAILEDAHQSQKNLSMAWIDYQKAFDSVSHEWILRILDIYKCPPMIKAFLQMVMPMWRLIMTARGHQESITTEPISIRRGIFQGDSLSPLLFCLAINPLSCILNKYETKGYKLKDSITVNHLLYMDDLKVYTSNRQHLKIMLDSIEIFTSDIGMRFGLDKCNTLHINAGHRTDTTGEGHVLLSGDTIRQLAIGDRYKYLGVHESGKIEHSIIREQITKEYFKRVKKLLNTYLNSRYLIKGINTYAIPVLLYSFGIINYKNIDLRKIDIKTRKLLAIKKAHQQKAEVQRLYLPITDGGRGLLNIEYIYKTHILKYKQYLNTESDHLIKAIAQHDINRNKYSIIKEAQEVETELHLRQGHIHTHKEIKAAIVKNSNEVWRNKQLHGQFPKKVLDQANVDKELSFNWIKKQQIPPSVESSIFAIQDQAIMTRQHQRDILKESVDGKCRLCACKDETTQHIISGCEKLVGTYYVRRHNNLVQYVYWCLAKKHQMDVSNLWWKETLIQPQVKENDTAKILWEMPVQTDITVTHNRPDIIYIDKINNKTYLIDISVPSDYNIGPKEIEKLSKYHLLKTEVTRLWKTQATVVPVVIGATGVVAKSLKKYIDNLDTNINISILQKQAAIQSSVILSKVLGDTVFVNSTQNQHTQNMQQSPDTQQSFSTLHSTNTTNTQLSTINRSNRGRGRRNVRA

SEQ ID NO: 31992 - protein, 1313 aa, Phalera bucephala
MERQLSNERLGPLPGGDRRGTSGADAGRDSMQTVSDSLLNRRVRVGGPENITADQRGGEGTDGALQSRASPTDSVGSSETTTHMELSDDRRRKWSTDELKELMFCYFKARAGGPGYIGRLQELFAERNPNNPKIHKFNGNTLSNQARRVIKQNVISQELLNCIQKQAEVIIEVQNIPSSEQNVNEVEEHNTMSLHNTISQNIQHIESYTVEQAETIDNFTQNIQVNEDQDPLILNFLQILAETKETSVEDRLLLPKAKINRLFLENLNKINTYLPNILITNNSLRDINDIIYAAAKTLIINNNQTPYIPKNTIKAKTDPPWKRRIQFKIDTYRKELGQLIEIERGTNTRRMMNIKDKLYRKHNIRSENDHTNIVEILKQKVKALAGRIKRYDNINSRKEQNNLFHENEHKFYRSLGGNNIKEVKLPNKERVEEFWSSILSIPVQYNNEARWIQEVEVSSNEVDTTDIHEISEDQIKFAVRKLLNWKSPGIDKIQNYYIKYFTSVHSYLASLFTKIVTQRETLEEWFTTGQVILIPKNEHTEDPKNWRPIACLPTMYKLLTSVLANILYKHCHENNIMAAEQRGCRRGVRGCKDHLMVNKAILEDAHQSQKNLSMAWIDYQKAFDSVSHEWLIKVLDVYKCPPMIKRFLELVMPAWRVIMTARGSQNSLTTEPITIRRGIFQGDSLSPLLFCLAINPLSFVLNKYEMKGYKLKDSFWINHLLYMDDLKIYANNKHNLKVLLDSVEIFTSDIGMRFGLDKCNIIHISSGHRSSVTGEGHILLNGEMINQLAVGDKYKYLGVHESGKIEHSIIKDQLCKEYFKRLKKLLNTHLNSRCLIKGINTYAIPVLLYSFGVINYKSSDLQKIDTKTRKLLAIKKAHQQKADVQRLYLPVAQGGRGLLNVEYMYKSQIIKYKQYLEAESDHLIKAIVEHDIHRDKYSVISEAKEIEGQLYFGRRVIHTDKQIKEAILKKHNEMWRNKQLHGQFPKKVLDQANIDIELSFKWIKKQQISPTIESSIFAIQDQAILTRQHQRDILKEPIDGKCRLCACKDETTQHIISGCEKLAGTYYVKRHNNLVQYVYWCLAKKHKIEVSNLWWKETLIQPQVKENEYTKILWEMPVHTDITVTHNRPDLIYVDKVNNKTYLIDITVPSDYNIGAKEIEKLSKYHLLKTEVSRLWNTQTTVIPIVIGATGIVAKSIKKYIDKLDTCIDISILQKQAAIHTSTILSKVLGDTVFVNNTQDSHIPNTEQSSHTQQATHTQPIAHTQQTSITQQLPSTPETSNTSHTQNTQRPPNTRQRNRRGRRRATFHTQQTP

SEQ ID NO: 31993 - protein, 1298 aa, Mimas tiliae
MERQINSKRIGPLPGGDRRGTSGADAGRDSMRTVSGSQLNRRARVGEPEGTTADQQGGEGTDDALQNRASPTDSVGSSVTTTDNAVSDDRRRKWSTEEIEELMFCYFKAKSGGPGYIGRLHNIFTERNPNNPKIHKFNGNTLSNQARRIIKQNVISKELLNLIQKRAEGAIIVPDTEIENTTQNVSVHTTQNTTMNTTVHNTQNTQQTDHITAAQAEEIEQLTENIVVNEDQNPLILNFLQILAETKETPISERLLLPKAKINKHFIENLQTLNKYLPSLLVTNKSLREVNNIIYATAKTLIINNNQTPYLPKNTIKTKTDPPWKKRIQTKIEQLRKELGQLIEIERGISTSRMMRIRDNLYRKYNIQNDNDHKNTVETIKQKVQALAGRIKRYEDMNTKKEQNTLFNENEHRLYRSLGNSSNRNIQLPSKERVEGFWSSILSNPIPYNSEAKWIEEVETSSNEVNTINIEEITEEQVKLATRKLLNWKCPGIDKIQNYYIKYLTSTHSFLASLFTKIVTGVENLEEWFTTGQVILIPKNEQTEGPKNWRPIACLPTMYKLLTSVLTNILYSHCEENNILAPEQRGCRRGARGCKDHLMINKAILEDAHQSQKNLSMAWIDYQKAFDSVSHEWILRILDIYKCPPMIKAFLQMVMPMWRLIMTARGHQESITTEPISIRRGIFQGDSLSPLLFCLAINPLSCILNKYETKGYKLKDSITVNHLLYMDDLKVYTSNRQHLKIMLDSIEIFTSDIGMRFGLDKCNTLHINAGHRTDTTGEGHVLLSGDTIRQLAIGDRYKYLGVHESGKIEHSIIREQITKEYFKRVKKLLNTYLNSRYLIKGINTYAIPVLLYSFGIINYKNIDLRKIDIKTRKLLAIKKAHQQKAEVQRLYLPITDGGRGLLNIEYIYKTHILKYKQYLNTESDHLIKAIAQHDINRNKYSIIKEAQEVETELHLRQGHIHTDKEIKAAIVRNSNEVWRNKQLHGQFPKKVLDQANVDKELSFNWIKKQQIPPSVESSIFAIQDQAIMTRQHQRDILKESVDGKCRLCACKDETTQHIISGCEKLVGTYYVRRHNNLVQYVYWCLAKKHQMDVSNLWWKETLIQPQVKENDTAKILWEMPVQTDITVTHNRPDIIYIDKINNKTYLIDISVPSDYNIGPKEIEKLSKYHLLKTEVTRLWKTQATVVPVVIGATGVVAKSLKKYIDKLDTNINISILQKQAAIQSSVILSKVLGDTVFVNSTQNQHTQNMQQSPDTQQSFSTLHSTNTTNTQPSTINRSNRGRGRRNVRACRQLIVNSQ

SEQ ID NO: 31994 - protein, 1290 aa, Telemiades fides
MANGALVTFINMERRPNNYKQWPLPGGDRRGTSGADAGRLSMQTVSGSLLNRRARVGKPENITADQRGGEGTVDALQSRASPTGSVGSVVSTTSNTLNDDKRRKWSTEEIEELMFCYFKARSGGAGYIGRLERLFTERNPNNPKIKKFNGNTLSNQARRIIKQNVLSQEQLHHIQRHAEGIIEIEENTDYNLVAEEQFTLIPTETHIDIPQNIHHIQYTTEQAETINSLTQNINVHEDEDPLILNFLQILGEVRETHITERPFLPKAKINKRFLENLNTLNKYLPNILITNNSLRDINDIIYATAKTLIINNNQTPYLPTNNLKNKSDPPWKKRIQTKIEIFRKELGQLIEIGRGINTRRMSKIKDKLYRKHKIENENDHKNLEEILKQKIKALAGRIKRYVDINKRKEQNQLFRESEHKLYNSLGNNNSVKDIKLPDKGKVEEFWSSILSNPIKYNDEARWIMDVESSSNEVTTTDIAEISEEQIKIAVRKLMNWKSPGIDKIQNYYIKYLTSLHGHLASLYTKIVTQREMLEDWFTTGQVILIPKNEYTEDPKNWRPIACLPTMYKLLTSVLANILYDHCHQNNIIAIEQRGCRRGARGCKDHLMVNKAVLEDAHQSQKNLSMAWVDYQKAFDSVSHEWLTKVLDVYKCPPVIKRFLRLVMPSWKVIMTARGTQSSLTTNPIFVRRGIFQGDSLSPLLFCLAINPLSFILNKYEMKGYKLKDSLWINHLLYMDDLKMYANSRHNLKVLLDSVEIFTNDIGMRFGLDKCNILHISSGHRSNVIGEGHILLDGEIIKQLAVGDTYKYLGVHETGKIDHNVIKDQITKEYFKRTKQLLNTHLNARNLIKGINTYAIPVLLYSFGVINYKNNDLKKVDTKTRKLLAMKKAHQQKAEVERLYLPLEQGGRGLLNVEYMYKTQIVKYKQYLEAKNDDLIKAIVEHDVRRDKYSIIKEAQEIENELHLTHDNIIKDKDIRKAIVKVQNDTWRGKALHGQFPNKVLDLMNVNKELSFKWIKNQQITPSIESSIFAIQDQAVMTRQHQRDILKSQVDGKCRVCACKDETTQHIISGCEKLAGTYYVRRHNNLVQYVYWCLARKHKIEVAKFWWQETLKQAQVKENDSVKILWEMPVQTDVTVAHNRPDLIYTDKENNKTYLIDVSVPSDYNIGAKEIEKLSKYHLLKTEVTRLWNTHTIIVPIIIGATGTVAKSITRYVEQLNANINIGILQKQAAIHTSIILSKVLGDSVFVHSTQCTPITQDTINTPTAERSSGTEHTDTQQRNRRGRRRGTIRK

SEQ ID NO: 31995 - protein, 1298 aa, Mimas tiliae
MERQINSKRIGPLPGGDRRGTSGADAGRDSMRTVSGSQLSRRARVGGPEGTTADQQGGEGTDDALQNRASPTDSVGSSVTTTDTAVSDDRRRKWSTEEIEELMFCYFKAKSGGPGYIGRLHNIFTERNPNNPKIHKFNGNTLSNQARRIIKQNVISKELLNLIQKRAEGAIIVPDTEIENTTQNVSVHTTQNTTMNTTVHNTQNTQQTDHITAAQAEEIEQLTENIVVNEDQNPLILNFLQILAETKETPISERLLLPKAKINKHFIENLQTLNKYLPSLLVTNKSLREVNNIIYATAKTLIINNNQTPYLPKNTIKTKTDPPWKKRIQTKIEQLRKELGQLIEIERGISTSRMMRIRDNLYRKYNIQNDNDHKNTVETIKQKVQALAGRIKRYEDMNTKKEQNTLFNENEHRLYRSLGNSSNRNIQLPSKERVEEFWSSILSNPIPYNSEAKWIEEVETSSNEVNTINIEEITEEQVKLATRKLLNWKCPGIDKIQNYYIKYLTSTHSFLASLFTKIVTGVENLEEWFTTGQVILIPKNEQTEDPKNWRPIACLPTMYKLLTSVLTNILYSHCEENNILAPEQRGCRRGARGCKDHLMINKAILEDAHQSQKNLSMAWIDYQKAFDSVSHEWILRILDIYKCPPMIKAFLQMVMPMWRLIMTARGHQESITTEPISIRRGIFQGDSLSPLLFCLAINPLSCILNKYETKGYKLKDSITVNHLLYMDDLKVYTSNRQHLKIMLDSIEIFTSDIGMRFGLDKCNTLHINAGHRTDTMGEGHVLLSGDTIRQLAIGDRYKYLGVHESGKIEHSIIREQITKEYFKRVKNLLNTYLNSRYLIKGINTYAIPVLLYSFGIIKYKNIDLRKIDIKTRKLLAIKKAHQQKAEVQRLYLPITDGGRGLLNIEYIYKTHILKYKQYLNTESDHLIKAIAQHDINRNKYSIIKEAQEIEMELHLRQGHIHTDKEIKAAIVKNSNEVWRNKQLHGQFPKKVLDQANVDKELSFNWIKKQQIPPSVESSIFAIQDQAIMTRQHQRDILKESVDGKCRLCACKDETTQHIISGCEKLVGTYYVRRHNNLVQYVYWCLAKKHQMDVSNLWWKETLIQPQVKENDTAKILWEMPVQTDITVTHNRPDIIYIDKINNKTYLIDISVPSDYNIGPKEIEKLSKYHLLKTEVTRLWKTQATVVPVVIGATGVVAKSLKKYIDKLDTNINISILQKQAAIQSSVILSKVLGDTVFVNSTQNQHTQNMQQSPDTQQSFSTLHSTNTTNTQPSTINRSNRGRGRRNVRACRQLIVNSQ

SEQ ID NO: 31996 - protein, 1295 aa, Polygonus savigny
MANGALVTFINMERRLNNCRQWPLPGGDRRGTSGADAGRPSMQTVSGSLLNRRARVGEPENVTADQRGGEGTVDALQSRASPTGSVGSAVSTTSNTLNDDKRRKWSTEETQELMFCYFKARSGGSGYIGRLEKLFTERNPNNPKIRKFNGNTLSNQARRIIKQNVLSQEQLHRIQNHAENNIEIRDNIEQNLITEEEQSTLVQTQTHIDTPQDMHHIQYTTEQAETINNLSLNINVHEDEDPLILNFLQILGETKEIYIAERPLLPKAKINKRFIENLNTLNKYLPNILITNNSLRDINDIIYATAKTLIINNKQSPYLPKNNLKSKSDPPWKKRIQTKIEIFRKELGQLIEIGRGINTCRMIKIKDKLYRKYTIENENDHKNTEEILKQKIKALAGRIKRYVDINKKKEQNNLFSENEHKLYKNLGNSHSIKDVKLPEKEIVEEYWSSILSNPIQYNNDARWITEVENSSNEVITSDIAEITEEQIKIAVRKLLNWKSPGIDKIQNYYLKYLTSLHSYLALLFTNIVTHRENLEEWFTTGQVILIPKNQYTEDPKNWRPIACLPTIYKLLSSVLANILYDHCHLNNIIAIEQRGCRRGARGCKDHLMVNKSILEDAHQSQKNLSMAWIDYQKAFDSVSHEWLTKVLDIYKCPPMIKNFLKLVMPSWKVIMTARGTQNSFTTNPISIRRGIFQGDSLSPLLFCLAINPLSLILNKYEIKGYKLKDSLWINHLLYMDDLKIYANNKYNLKVLLDSVEIFTNDIGMRFGLDKCNILHITAGHRSNVTGEGHILLDGENIKQLAIGDTYKYLGIHETGKIDHSVIKDQITKEYFKRIKQLLNSHLNARYLIKGINTYAIPVLLYSFGVINFKNNDLKKIDTKTRKLLAIKKAHQQKAEVERLYLPVNQGGRGLLNIEYMYKTQIIKYKQYLKTKSDSLIKAIFEHDIHRDKYSIINEAHEIENELFLTHNDIHTDKDIREAIVKTQNNKWRGKQLHGQFPTKVLDLLNIDTELSFKWTKNQQITPSMESSIFAIQDQAVMTRQHQRDILKLQVDGKCRLCACKDETTQHIISGCEKLAGTYYVKRHNNLVQYVYWCLAKKHNIEVAKFWWQETLRQPQVKENESAKILWEMPVQTDVTVTHNRPDLIYTDKENNKTYLIDVTVPTDYNIAAKEIEKLSKYHLLKTEITRLWNTHTSIVPIVIGATGVVAKSVTKYIDKLNAHINIGILQKQAAIHTSIILSKVLGDTVFVHNTHSTTQGTTTQQTSNIPTAEESVRTRHPNTQMRQRRGRRRRGTSRK

SEQ ID NO: 31997 - protein, 1298 aa, Mimas tiliae
MERQINSKRIGPLPGGDRRGTSGADAGRDSMRTVSGSQLNRRARVGEPEGTTADQQGGEGTDDALQNRASPTDSVGSSVTTTDNAVSDDRRRKWSTEEIEELMFCYFKAKSGGPGYIGRLHNIFTERNPNNPKIHKFNGNTLSNQARRIIKQNVISKELLNLIQKRAEGAIIVPDTEIENTTQNVSVHTTQNTTMNTTVHNTQNTQQTDHITAAQAEEIEQLTENIVVNEDQNPLILNFLQILAETKETPISERLLLPKAKINKHFIENLQTLNKYLPSLLVTNKSLREVNNIIYATAKTLIINNNQTPYLPKNTIKTKTDPPWKKRIQTKIEQLRKELGQLIEIERGISTSRMMRIRDNLYRKYNIQNDNDHKNTVETIKQKVQALAGRIKRYEDMNTKKEQNTLFNENEHRLYRSLGNSSNRNIQLPSKERVEGFWSSILSNPIPYNSEAKWIEEVETSSNEVNTINIEEITEEQVKLATRKLLNWKCPGIDKIQNYYIKYLTSTHSFLASLFTKIVTGVENLEEWFTTGQVILIPKNEQTEDPKNWRPIACLPTMYKLLTSVLTNILYSHCEENNILAPEQRGCRRGARGCKDHLMINKAILEDAHQSQKNLSMAWIDYQKAFDSVSHEWILRILDIYKCPPMIKAFLQMVMPMWRLIMTARGHQESITTEPISIRRGIFQGDSLSPLLFCLAINPLSCILNKYETKGYKLKDSITVNHLLYMDDLKVYTSNRQHLKIMLDSIEIFTSDIGMRFGLDKCNTLHINAGHRTDTTGEGHVLLSGDTIRQLAIGDRYKYLGVHESGKIEHSIIREQITKEYFKRVKKLLNTYLNSRYLIKGINTYAIPVLLYSFGIINYKNIDLRKIDIKTRKLLAIKKAHQQKAEVQRLYLPITDGGRGLLNIEYIYKTHILKYKQYLNTESDHLIKAIAQHDINRNKYSIIKEAQEVETELHLRQGHIHTDKEIKAAIVRNSNEVWRNKQLHGQFPKKVLDQANVDKELSFNWIKKQQIPPSVESSIFAIQDQAIMTRQHQRDILKESVDGKCRLCACKDETTQHIISGCEKLVGTYYVRRHNNLVQYVYWCLAKKHQMDVSNLWWKETLIQPQVKENDTAKILWEMPVQTDITVTHNRPDIIYIDKINNKTYLIDISVPSDYNIGPKEIEKLSKYHLLKTEVTRLWKTQATVVPVVIGATGVVAKSLKKYIDKLDTNINISILQKQAAIQSSVILSKVLGDTVFVNSTQNQHTQNMQQSPDTQQSFSTLHSTNTTNTQPSTINRSNRGRGRRNVRACRQLIVNSQ

SEQ ID NO: 31998 - protein, 1298 aa, Mimas tiliae
MERQINSKRIGPLPGGDRRGTSGADAGRDSMRTVSGSQLSRRARVGGPEGTTADQQGGEGTDDALQNRASPTDSVGSSVTTTDNAVSDDRRRKWSTEEIEELMFCYFRAKSGGPGYIGRLHNIFTERNPNNPKIHKFNGNTLSNQARRIIKQNVISKELLNLIQKRAEGAIIVPDTEIENTTQNVSVHTTQNTTMNTTVHNTQNTQQTDHITAAQAEEIEQLTENIVVNEDQNPLILNFLQILAETKETPISERLLLPKAKINKHFIENLQTLNKYLPSLLVTNKSLREVNNIIYATAKTLIINNNQTPYLPKNTIKTKTDPPWKKRIQTKIEQLRKELGQLIEIERGISTSRMMRIRDNLYRKYNIQNDNDHKNTVETIKQKVQALAGRIKRYEDMNTKKEQNTLFNENEHRLYRSLGNSSNRNIQLPSKERVEEFWSSILSNPIPYNSEAKWIEEVETSSNEVNTINIEEITEEQVKLATRKLLNWKCPGIDKIQNYYIKYLTSTHSFLASLFTKIVTGVENLEEWFTTGQVILIPKNEQTEDPKNWRPIACLPTMYKLLTSVLTNILYSHCEENNILAPEQRGCRRGARGCKDHLMINKAILEDAHQSQKNLSMAWIDYQKAFDSVSHEWILRILDIYKCPPMIKAFLQMVMPMWRLIMTARGHQESITTEPISIRRGIFQGDSLSPLLFCLAINPLSCILNKYETKGYKLKDSITVNHLLYMDDLKVYTSNRQHLKIMLDSIEIFTSDIGMRFGLDKCNTLHINAGHRTDTTGEGHVLLSGDTIRQLAIGDRYKYLGVHESGKIEHSTIREQITKEYFKRVKKLLNTYLNSRYLIKGINTYAIPVLLYSFGIINYKNIDLRKIDIKTRKLLAIKKAHQQKAEVQRLYLPITDGGRGLLNIEYMYKTHILKYKQYLSTESDHLIKAIAQHDINRNKYSIIKEAQEVETELHLRQGHIHTDKEIKAAIVRNSNEVWRNKQLHGQFPKKVLDQANVDKELSFNWIKKQQIPPSVESSIFAIQDQAIMTRQHQRDILKESVDGKCRLCACKDETTQHIISGCEKLVGTYYVRRHNNLVQYVYWCLGKKHQMDVSNLWWKETLIQPQVKENDTAKILWEMPVQTDITVTHNRPDIIYIDKINNKTYLIDISVPSDYNIGPKEIEKLSKYHLLKTEVTRLWKTQATVVPVVIGATGVVAKSLKKYIDKLDTNINISILQKQAAIQSSVILSKVLGDTVFVNSTQNQHTQNMQQSPDTQQSFSTFHSINTTNTQPSTINRSNRGRGRRNVRACRQLIVNSQ

SEQ ID NO: 31999 - protein, 1311 aa, Pythonides amaryllis
MTNGALETFTYMNMKRHIISSRLGPLPGGDRRGTSGADAGRDSMQTVSDSLLNRRARVGEPESITADQGDGERTDGALQSRASPTDSAGSSVTTTNNRINDRRRKWSREEMEELMYCYFKARTDGGGYIERLDKLFKERNPNNPKIHKFNGNTLSNQARRILKQNVLSQELLNRLQKHAEGTLEVIDNSNKEINEDEQTITQSHITLLQNTPYTEYTTEQAQIIDQLTQNIQVNEDQDPLILNFLQLLSETREMNIEDRLFLPKAKINKHFIENLNKLNKYLPNVLVTNNSLREINNIIYAVAKTLITNNNQSLYSPRNTVKNVITQPWKKRIQTKIEILRKELGQLIEIDKGINTRRIIKIKDKLYGKYNIQNENDHKSVQEILMQKIKALAGRIKRYEDMKNRKDQNNLFSENEHKLYRTLGNNKVKDIKLPSKETVEEFWSSILSNPIQYENKAKWIEEVEVASSEVNTIDTEEITEEHIKITIRNLLNWKMPGIDRIQNYYLKYLTSVHRYLATLFTKIVTNKETLEEWFTTGQVILVPKNENTEDPKNWRPIACLPTMYKLLTSVLADILYNHCHQNNIMALEQRGCRRGCRGCKDHLMVNKAILEDAHQSQKNLSMAWIDYQKAFDSVSHEWIKRVLDVYKCPLIIKRFLELVMPSWKVIMTARGTRDSLTTEPIIVKRGIFQGDSLSPLLFCLAINPLSFILNKYEMKGYKLKDSIWVNHLLFMDDLKIYANSKHNLEVLVDSVEIFTTDIGMRFGLDKCNIVHLNSGHRNNVSGEGHILLDGKMINELAIEDKYKYLGVHESGKIEHNVVREQITKEYFKRIKKLLNTHLNSRNLIKGINTYAIPVLMYSFGVINYKNSDLKKIDTKTRKLLAINKVHQQKAEVERLYLPVMQGGRGLLNIEFMYKKQIIKYKQYLKAESDILIKAIVEHDKHKDKYSIINEAQKIENQLHLEQGKVHTDKEINEAIVKRSTKIWRNKQLHGQFLKKVLDQANIDTQLSFKWIKKQQISPTIESSIFAIQDQAIMTRQHRRDILKEPVDGKCRLCNGKDETTQHIISGCEKLAGNYYVKRHNNLVQYVYWCLARKHKIDVSNIWWKETLIQPQVKENDAAKIMWEIPVQTDVTVTHNRPDIIYIDKINNKTYLIDITVPSDYNIGPKEIEKLSKYHLLKNEVTRLWKTQASVIPIVIGATGVVAKSIKKHIDKLDTYIDITILQKQAAIHSSIILSKVLGDTVFVNNTQIGNTHNTEQTSHTIQPANIQHTSRNEQITNLSSNLHIEKQHIVTCTHQLRNRRRRRRGRRKGNR

SEQ ID NO: 32000 - protein, 1216 aa, Hyalothyrus neleus
MFCYFKARAGGPGYIERLHELFTGRNPNNLKIHKFNGYTLSNQARRIINHNVMSQELLDRIQKHAEGSIASIESSEQNIIVEHTQQEEHTTTQSHIISQQHTQHIQYTSEQAQTIDQLTNNIEVNEDQDPLVLNFLQILTEIKETPVAERQFLPKAKINKHFIEKLHILNKYLPNILITNNTLRDINDTIYAAAKALIVSNNQTPYTPENTFNIKSDPPWKKRIQNKIEILRKELGQLIEIDRGINTRRMNKIKDKLYTKHNIQSKNDHKNIEEILKQKIKALAGRIKRYEDMNTKKKQNSLFNENEHKLYRSLGGNSFKNIKLPSKEMVEEYWSTILSNPIQYNSEAKWIKEVENSTREVNTIDTEEITEEQIKLAIKKLLNWKSPGIDKIQNYYLKYFTSVHSYLASLFTKIVTHKETLEDWFTTGQVILIPKNEHTEDPKNWRPIACLPTMYKLLTSVLANILYHHCHQNSIIAIEQRGCRREVRGCKDHLMVNNAILEDAHQSQKNLSMAWVDYQKAFDSVSHEWLTKVLDVYNCPPMIKGFLNLVMPLWKVIMTARGSQTTLTTGPISIKRGIFQGDSLSPLLFCLAVNPISFMLNKYEMKGYKLKDSLWINHLLYMDDLKIYANNRHNLKVLLDSVEIFTKDIGMRLGLDKCNTLHISAGHRSSVTGKGHILLSGEIIEQLAIGDRYKYLGVHESGKIEHSVIRDQITKEYFKRVKKLLNTHLNARYLIKGINTYAIPVLLYSFGVIHYKNSDFKKIDIKTRKLLAIKKAHQQKAEVERLYLPVTQGGRGLINVENMYNTHILKYKQYLKAESDDLIKVIVQHDIHKDKYSIINEAREIENQLHLTQGNTHTDKDIKEAIVKKCNKIWRNKQLHGQFPRKVLDQTNIDTELSFSWTKKQQISPKLESSIFAIQDQAVMTRQHRRDILKEQLDGKCRLCASKDETTQHIISGCEKLAGNYYVKRHNNLVQYVYWCLAKKHKIEVSNLWWKETLIQPQVKENETTKILWEMPIQTDITITHNRPDLIYVDKIKNKTYLIDITVPSDYNIGAKEVEKLSKYHLLKTEVSRLWNTQATVIPIVIGATGVVAKSIKKYIDQLDTYIDISILQKQAAIHSSTILSKVLGDTVFVNNTQNQNTEQPSHTIQSPDTQPQLHTSSSTAQLTPHTQQTSISQQLLSHTSESNNTRHTQNTREHSNTQHRNRRRERKGTNI

SEQ ID NO: 32001 - protein, 1327 aa, Pyrrhopyge pelota
MPREGRTLETLRVRYTPMTNGALVTFVNMERQFRKRTLGPLPGGDRRGTSGADAGRDSMQTVSDSLLNRRARVGRPENTTADQRGGEGTDDALQSRATPTDSVGSSVSTTNNAISDDRRRKWSTEELQELMFCYFKARLDGVGYIDRLHTIFTERNPGNPKIHKFNGNTLANQARRIIKQNVISQELLDRIQKRAEGRIDTVENLDQNVVEEEATAPRNIITPSTHHVDYSIEQIESIDRLTQNIEVNEDQDPLILNFLQILSETKETVIEERLLLPKAKINKRFLENLCKLNKFLPNILATNHSLRDINNIIYAAAKTLIINNNQKPYTPKNTFKNKFDPPWKKRIQTKIEKFRKELGQLIELGRGNNTRRMTKIKDKLYRQYNIQNENEHRNTEETLKQKIKALAGRIKRYEDINSRKKQNSLFNENEHKLYRSLGSNSFKENNIKLPDKEIVKEFWSSILSNPIHYNSKAQWIKEIEMTSSDINTIDIKEISEEHIKYAIKKLLNWKTPGIDKIQNYYLKYFTSVHSYLGSIFTKIVSDKESLEEWFTTGQVILIPKNEQTEDPKNWRPIACLPTMYKLLSSVLSNILYEHCHQNNIIAIEQRGCRRGARGCKDHLMVNKAILEDAHQSQKNLSMAWIDYQKAFDSVPHEWLVKVLDVYKCPPIIKRFLEIAMPSWKVVMTARGGNNSLITEPIYVRRGIFQGDSLSPLLFCLAINPLSFILNKYEMKGYKLKDSLWINHLLYMDDLKIYANNSHNLKVLLDSVEIFTRDIGMRFGLDKCNTIDISSGRRNKVTGEGHILLEGDIIEQLAIGDRYKYLGIHESGKIEHSVVRDHITKEYFRRIKKLINTHLNSRNLIKGINTYAIPVLMYSFGVINYKNSDLKKIDTKTRKLLAIKKAHQQKAEVERLYLPVTQGGRGLLNVEYMYKTQIVKCKQYLKAEGDELIKAIVTHDRHRDKYSIIKEAQDIENQLHLARKDKHTDKDIREAIVKKCKDIWRNKQLHGQFIRNVLDQTNIDTELSFTWIKKQQISPTIESSIFAIQDQAIVTRQHRRDILKEPIDGKCRLCACKDETTQHIISGCEKLAGSYYIKRHNNLVQYVYWCLAKKHKIEVSNFWWKETLIQPQVKENENVKILWEMPVQTDVTITHNRPDLIYIDKTNNRTYLIDVTVPSDYNIGPKEIEKLSKYHLLKNEVSRLWKTQATIIPIVIGATGIVGKNVKKYIEKLDAFIDITILQKQAAINSSVILSKVLGDTVFVNNTQNTQNTEQPIHSEQASHIQNIPEQSLTNTTDSTIQHLTNTGAPHRSREREGTQQRIVRRRGRIVK

SEQ ID NO: 32002 - protein, 1288 aa, Polygonus leo
MANGALVTFINMERRLNNCRQWPLPGGDRRGTSGADAGRPSMQTVSGSLLNRRARVGEPENVTADQRGGEGTVDALQSRASPTGSVGSAVSTTSNTLNDDKRRKWSTEETQELMFCYFKARSGGSGYIGRLEKLFTERNPNNPKIRKFNGKTLSNQARRIIKQNVLSQEQLHRIQNHAENNIEIRDNIEQHFITEEEQSTLVQTQTHIDTPQDMHHIQYTTEQAETINNLSLNINVHEDEDPLILNFLQILGETKEISIAERPLLPKAKINKRFIENLNTLNKYLPNILITNNSLRDINDIIYATAKTLIINNKQSPYLPKNNLKSKSDPPWKKRIQTKIEIFRKELGQLIEIGRGINTCRMIKIKDKLYRKYTIENENDHKNTEEILKQKIKALAGRIKRYVDINKKKEQNTLFSENEHKLYRNLGNSDSIKDVKLPEKEIVEEYWSSILSNPIQYNNDARWITEVENSLNEVITSDIAEITEEQIKIAVRKLLNWKSPGIDKVQNYYLKYLTSLHSYLALLFTNIVTHRENLEEWFTTGQVILIPKNQYTEDPKNWRPIACLPTMYKLLTSVLANTLYEHCHQNNIMAIEQRGCRRGARGCKDHLMVNKAILEDAHQSQKNLSMAWIDYQKAFDSVSHEWLTKVLDVYKCPPMIKRFLKLVMPSWKVIMTARGAQISFTTNPISIRRGIFQGDSLSPLLFCLAINPLSLILNKYKIKGYKLKDSLWINHLLYMDDLKIYANNKHNLKVLLDSVEIFTNDIGMRFGLDKCNILHISAGHRSNVTGEGHILLGGENIKQLAIGDTYKYLGIHETGKIDHSVIKDQITKEYFKRIKQLLNSHLNARYLIKGINTYAIPVLLYSFGVINYKNNDLKKIDTKTRKLLAIKKAHQQKAEVERLYLPVNQGGRGLLNIEYMYKTQIIKYKQYLKTKTDSLIKAIVEHDTHRDKYSIINEAHEIENELFLTHNDIHTDKDIREAIVKTQNNKWRGKQLHGQFPTKVLDLMNIDTELSFKWTKNQQTTPSLESSIFAIQDQAVMTRQHQRDILKSQVDGKCRLCACKDETTHHIISGCEKLAGTYYVKRHNNLVQYVYWCLAKKHNIEVAKFWWQETLRQPQVKENESAKILWEMPVQTDVTVTHNRPDLIYTDKENNKTYLIDVTVPTDYNIAAKEIEKLSKYHLLKTEITRLWNTHTSIVPIVIGAIGVVAKSVTKYIDKLNAHINIGILQSQAAIHTSIILSKVLGDTVFLHNTHSIIQGTTQQTSNIPTAEQIVHTNTQMRQRRSRRRRRR

SEQ ID NO: 32003 - protein, 1325 aa, Pyrrhopyge papius
MPREGRTLETLKVRYTPMTNGALVTFVNMERQFRKRTLGPLPGGDRRGTSGADAGRDSMQTVSDSLLNRRARVGRPENTTAEQRGGEGTDDALQSRATPTDSVGSSVSTTNNAISDDRRRKWSTEELQELMFCYFKARLDGVGYIDRLHTIFTERNPGNPKIHKFNGNTLSNQARRVIKQNVISQELLDRIQKRAEGRIDTVENLDQNVAEEEATAPRNIITPSTHHIDYSIEQIESIDRLTQNIEVNEDQDPLILNFLQILSETKETVIEERLLLPKAKINKRFLENLCKLNKFLPNILATNHSLRDINNIIYAAAKTLIINNNQIPYTPKNTFKNKFDPPWKKRIQTKIEKFRKELGQLIELGRGNITRRMTKIKDKLYRQYNIQNENEHRNTEETLKQKIMALAGRIKRYEEINSRKKQNSLFNENEHKLYRSLGSNSFKDIKLPDKEIVKEFWSSILSNPVHYNSKAKWIKEIEMTSSEINTIDIKEISEEHIKYAIKKLLNWKTPGIDKIQNYYLKYFTSVHSYLGSTFTKMVSDKESLEEWFTTGQVILIPKNEQTEDPKNWRPIACLPTMYKLLSSVLSNILYEHCHQNNIIAIEQRGCRRGARGCKDHLMVNKAILEDAHQSQKNLSMAWIDYQKAFDSVPHEWLVKVLDVYKCPPIIKRFLEIAMPSWKVVMTARGANSSLTTEPIYVRRGIFQGDSLSPLLFCLAINPLSFILNKYEMKGYKLKDSLWINHLLYMDDLKIYANNSHNLKVLLDSVEIFTRDIGMRFGLDKCNTIDINSGRRNKVTGEGHILLEGDIIEQLAIGDRYKYLGIHESGKIEHSVVRDHITKEYFKRIKKLINTHLNSRNLIKGINTYAIPVLMYSFGVINYKNSDLKKIDTKTRKLLAIKKAHQQKAEVERLYLPVTQGGRGLLNVEYMYKTQIVKYKQYLKAEGDELIKAIVTHDTHRDKYSIIKEAQEIENQLHLARKDKHTDKDIREAIVKKCKDIWRNKQLHGQFIRNVLDQTNIDTELSFKWIKKQQISPTIESSIFAIQDQAIMTRQHRRDILKEPIDGKCRLCACKDETTQHIISGCEKLAGNYYIKRHNNLVQYVYWCLAKKHKIEVSNFWWKETLIQPQVKENENVKILWEMPVQTDVTITHNRPDLIYIDKTNNRTYLIDVTVPSDYNIGPKEIEKLSKYHLLKNEVSRLWKTQATIIPIVIGATGIVGKNVKKYIEKLDTFIDITILQKQAAINSSVILSKVLGDTVFVNNTQNKQNTEQPIHSEQASHIQNIPEQLLTNTTDSTIQHLTNTGAPHCPREREGMQQRSVRRRGRIVK

SEQ ID NO: 32004 - protein, 1093 aa, Drephalys kidonoi
MFCYFKARSGGPGYIDRLQELFTERNPNNPKIHKFNGNTLSNQARRIIKQNVLSQELLDRIQKRAEGTIELIESIEQNVLEEEEHLATQTHTAIPQHTQHTEYTTEQVHLIDQLTNNIEVSEDQDPLVLTFLQILTEVKETPVAERHFLPKAKINKRFIENLHTLNKYLPNILITNNTLRDINNIIYAAAKTLIIENKQTPYIPNNSWKIKSDPPWKKRIQNKIEIFRKELGQLIEIDRGINTHRMTKIKDKLYRKHNIHSNNDHKNIEEILKQKIKALAGRIKRYEDMNTKKTQNKLFNENEHKLYRTLGSNSFKDIKLPNKETVEEYWSTILSNDIQYNNKAKWIREVENSTNGVNTTEVEDISEEQVKQAIRKLLNWKAPGIDKIQNYYLKYFTSVHSYLASLFTKIATHKETLEDWFTTGQVILIPKNEHTEDPKNWRPIACLPTMYKLLTSVLADILYNHCHQNNIIAIEQRGCRREARGCKDHLLVNKAILEDAHQSQKNLSMAWIDYQKAFDSVSHEWLTKVLDVYKCPAMIKEFLKLVMPTWRVVMTARGSQSSLTTEPIHIRRGIFQGDSLSPLLFCLAINPISFVLNKYEMKGYKLKDSLWVNHLLYMDDLKIYANNRHNLKVLIDSVEIFTKDIGMRLGLDKCNTLDISAGHRSNAMGKGHVLLSGELIKQLEIGDRYKYLGVHESGKIEHGVIRDQITKEYFKRIKKLLNTHLNSRYVIKGINTYAIPVLLYSFGVINYKDSDLKKIDTKTRKLLAIKKAHQQKAEVERLYLPITQGGRGLLNVENMYKAHIIKYKQYLKTEYDDLIKAVVKHDIHRDKYSIINEAKEIENQLHLSHGSTHTDTEIKTAIVKRCNVIWRNKQLHGQFPKKVLDQTNIDTELSFAWIKRQQISSSTESSIFAIQDQAIMTQQHRRDILKEPVDGKCRLCACKDETTQHIISGCEKLAGNYYVKRHNNLVQYVYWCLAKKHKIEVSNFWWKQHLTQPQVKENETTKILWEMPVQTDVTVTHNRPDLIYTDKIKNKTYLIDITVPSDYNIGPKEIEKLSKYHLLKTEVSRLWNTHTTVIPIVIGATGVVAKRGL

SEQ ID NO: 32005 - protein, 1313 aa, Phalera bucephala
MERQLSNERLGPLPGGDRRGTSGADAGRDSMQTVSDSLLNRRVRVGGPENITADQRGGEGTDGALQSRASPTNSVGSSETTTHMELSDDRRRKWSTDELKELMFCYFKARAGGPGYIGRLQELFAERNPNNPKIHKFNGNTLSNQARRIIKQNVISQELLNCIQKQAEGIIEVQNIQSSEQNVNEVEEHNTMSLHNTISQNTQHIESYTVEQAETIDNFTQNIQVNEDQDPLILNFLQILAETKETSVEDRLLLPKAKINRLFLENFNKINTYLPNILITNNSLRDINDIIYAAAKTLIINNNQTPYIPKNTIKAKTDPPWKRRIQFKIDIYRKELGQLIEIERGTNTRRMINIKDKLYRKHNIQSENDHRNIVEILKQKVKALAGRIKRYDNINSRKEQNNLFHENEHKFYRSLGGNNIKEVKLPNKERVEEFWASILSIPVEYNNEARWIQEVEISSNEVNTTDIQEISEDQIKFAVRKLLNWKSPGIDKIQNYYIKYFTSVHSYLASLFTKIVTQRETLEEWFTTGQVILIPKNEHTEDPKNWRPIACLPTMYKLLTSVLANILYKHCHENNIMAAEQRGCRRGVRGCKDHLMVNKAILEDAHQSQKNLSMAWIDYQKAFDSVSHEWLIKVLDVYKCPPMIKRFLELVMPAWRVIMTARGSQNSLTTEPITIRRGIFQGDSLSPLLFCLAINPLSFVLNKYEMKGYKLKDSFWINHLLYMDDLKMYANNKHNLKVLLDSVEIFTSDIGMRFGLDKCNIIHISSGHRSSVTGEGHILLNGEMINQLAVGDKYKYLGVHESGKIEHSIVKDQLCKEYFKRLKKLLNTHLNSRCLIKGINTYAIPVLLYSFGVINYKSSDLQKIDTKTRKLLAIKKAHQQKADVQRLYLPVAQGGRGLLNVEYMYKSQIIKYKQYLEAESDHLIKAIVEHDIHRDKYSVISEAKEIEGQLYLGRRVIHTDKQIKEAILKKHNEMWRNKQLHGQFPKKVLDQANIDIELSFKWIKKQQISPTIESSIFAIQDQAILTRQHQRDILKEPIDGKCRLCACKDETTQHIISGCEKLAGTYYVKRHNNLVQYVYWCLAKKHKIEVSNLWWKETLIQPQVKENEYTKILWEMPVHTDITVTHNRPDLIYVDKVNNKTYLIDITVPSDYNIGAKEIEKLSKYHLLKTEVSRLWNTQTTVIPIVIGATGIVAKSIKKYIDKLDTCIDISILQKQAAIHTSTILSKVLGDTVFVNNTQDSHTPNTEQSSHTQQATHTQPIAHTQQTSITQQLSSTPETSNTSHTHNTQRPPHTRLRNRRGRRRATFHTQQTP

SEQ ID NO: 32006 - protein, 1313 aa, Phalera bucephala
MERQLSNERLGPLPGGDRRGTSGADAGRDSMQTVSDSLLNRRVRVGGPENITADQRGGEGTDGALQSRASPTDSVGSSETTTHMELSDDRRRKWSTDELKELMFCYFKARAGGPGYIGRLQELFAERNPNNPKIHKFNGNTLSNQARRIIKQNVISQELLNCIQKQAEGIIEVQNIQSSEQNVNEVEEHNTMSLHNTISQNIQHIESYTVEQAKTIDNFTQNIQVNEDQDPLILNFLQILAETKETSVEDRLLLPKAKINRLFLENFNKINTYLPNILITNNSLRDINDIIYAAAKTLIINNNQTPYIPKNTIKAKTDPPWKRRIQFKIDIYRKELGQLIEIERGTNTRRMINIKDKLYRKHNIQSENDHRNIVEILKQKVKALAGRIKRYDNINSRKEQNNLFHENEHKFYRSLGGNNIKEVKLPNKERVEEFWSSILSIPVEYNNEARWIQEVEFSSNEVNTTDIQEISEDQIKFAVRKLLNWKTPGIDKIQNYYIKYFTSVHSYLASLFTKIVTQRETLEEWFTTGQVILIPKNEHTEDPKNWRPIACLPTMYKLLTSVLANILYKHCHENNIMAVEQRGCRRGVRGCKDHLMVNKAILEDAHQSQKNLSMAWIDYQKAFDSVSHEWLIKVLDVYKCPPMIKKFLQLVMPAWRVIMTARGSQNSLTTEPITIRRGIFQGDSLSPLLFCLAVNPLSFVLNKYEMKGYKLKDSFWINHLLYMDDLKIYANNKHNLKVLLDSVEIFTSDIGMRFGLEKCNIIHISSGHRSSVTGEGHILLNGEMINQLAVGDRYKYLGVHESGKIEHTIIKDQLCKEYFKRLKKLLNTHLNSRCLIKGVNTYAIPVLLYSFGVINYKSSDLQKIDTKTRKLLAIKKAHQQKADVQRLYLPVAQGGRGLLNVEYMYKAQIVKYKQYLEAESDHLIKAIVEHDIHRDKYSVINEGKEIEGQLCLGRGVMHTDKQIKEAILKKHNEIWRSKQLQGQFPKKVLDQANIDTELSFKWIKKQQISPTIESSIFAIQDQAILTRQHQRDILKEPIDGKCRLCACKDETTQHIISGCEKLAGTYYVKRHNNLVQYVYWCLAKKHKIEVSNLWWKETLIQPQVKENEYTKILWEMPVHTDVTVTHNRPDLIYVDKVNNKTYLIDITVPSDYNIGAKEIEKLSKYHLLKTEVSRLWNTQTTVIPIVIGATGIVAKSIKKYVDKLDTCIDISILQKQAAIHTSTIISKVLGDTVFVNNTQDSHIPNTEQSTHTQQATHTQPIAHTQQTSITQQLSSTPETSNTSHTQNTQRPPNTRQRNRRGRRRATFHTQQTP

SEQ ID NO: 32007 - protein, 1313 aa, Phalera bucephala
MERQLSNERLGPLPGGDRRGTSGADAGRDSMQTVSDSLLNRRVRVGGPENITADQRGGEGTDGALQSRASPTDSVGSSETTTHMELSDDRRRKWSTDELKELMFCYFKARAGGPGYIGRLQELFAERNPNNPKIHKFNGNTLSNQARRIIKQNVISQELLNCIQKQAEGIIEVQNIQSSEQNVNEVEEHNTMSLHNTISQNIQHIESYTVEQAETIDNYTQNIQVNEDQDPLILNFLQILAETKETSVEDRLLLPKAKINRLFLENLNKINTYLPNILITNNSLRDINDIIYAAAKTLIINNNQTPYIPKNTIKAKTDPPWKRRIQFKIDTYRKELGQLIEIERGTNTRRMMNIKDKLYRKHNIQSENDHRNIVEILKQKVKALAGRIKRYDNINSRKEQNNLFHENEHKFYRSLGGNNIKEVKLPNKERVEEFWSSILSIPVEYNNEARWIQEVEVSSNKVNTTDIQEISEDQIKFAVRKLLNWKSPGIDKIQNYYIKYFTSVHSYLASLFTKIVTQRETLEEWFTTGQVILIPKNEHTEDPKNWRPIACLPTMYKLLTSVLANILYKHCHENNIMAVEQRGCRRGVRGCKDHLMVNKAILEDAHQSQKNLSMAWIDYQKAFDSVSHEWLIKVLDVYKCPPMIKKFLQLVMPAWRVVMTARGSQNSLTTEPITIRRGIFQGDSLSPLLFCLAVNPLSFVLNKYEMKGYKLKDSFWINHLLYMDDLKIYANNKHNLKVLLDSVEIFTSDIGMRFGLEKCNIIHISSGHRSSVTGEGHILLNGEMINQLAVGDRYKYLGVHESGKIEHSIIKDQLCKDYFKRLKKLLNTHLNSRCLIKGVNSYAIPVLLYSFGVINYKSSDLQKIDTKTRKLLAIKKAHQQKADVQRLYLPVAQGGRGLLNVEYMYKAQIVKYKQYLEAESDHLIKAIVEHDIHRDKYSVINEAKEIEGQLYLGRGVMHTDKQIKEAILKKHNEMWRSKQLHGQFPNKVLDQANIDTELSFKWIKKQQISPTIESSIFAIQDQAILTRQHQRDILKEPIDGKCRLCACKDETTQHIISGCEKLAGTYYVKRHNNLVQYVYWCLAKKHKIEVSNLWWKETLLQPQVKENEYTKILWEMPVHTDVTVTHNRPDLIYVDKVNNKTYLIDITVPSDYNIGAKEIEKLSKYHLLKTEVSRLWNTQTTVIPIVIGATGIVAKSIKKYVDKLDTCIDISILQKQAAIHSSTILSKVLGDTVFVNNTQDFHIPNTEQSTHTQQATHTQPIAHTQQTSITQQLSSTPETSNTSHTQNTQRPPNTRQRNRRGRRRATFHTQQTP

SEQ ID NO: 32008 - protein, 1313 aa, Phalera bucephala
MERQLSNERLGPLPGGDRRGTSGADAGRDSMQTVSDSLLNRRVRVGGPENITADQRGGEGTDGALQSRASPTDSVGSSETTTHMELSDDRRRKWSTDELKELMFCYFKARAGGPGYIGRLQELFAERNPNNPKIHKFNGNTLSNQARRVIKQNVISQELLNCIQKQAEVIIEVQNIPSSEQNVNEVEEHNTMSLHNTISQNIQHIESYTVEQAETIDNFTQNIQVNEDQDPLILNFLQILAETKETSVEDRLLLPKAKINRLFLENFNKINTYLPNILITNNSLRDINDIIYAAAKTLIINNNQTPYIPKNTIKAKTDPPWKRRIQFKIDTYRKELGQLIEIERGTNTRRMMNIKDKLYRKHNIQSENDHRNIVEILKQKVKALAGRIKRYDNINSRKEQNNLFHENEHKFYRSLGGNNIKEVKLPNKERVEEFWASILSIPVEYNNEARWIQEVEVSSNEVNTTDIQEISEDQIKFAVRKLLNWKSPGIDKIQNYYIKYFTSVHSYLASLFTKIVTQRETLEEWFTTGQVILIPKNEHTEDPKNWRPIACLPTMYKLLTSVLANILYKHCHENNIMAAEQRGCHRGVRGCKDHLMVNKAILEDAHQSQKNLSMAWIDYQKAFDSVSHEWLIKVLDVYKCPPMIKRFLELVMPAWRVIMTARGSQNSLTTEPITIRRGIFQGDSLSPLLFCLAVNPLSFVLNKYEMKGYKLKDSFWINHLLYMDDLKIYANNKHNLKVLLDSVEIFTSDIGMRFGLEKCNIIHISSGHRSSVTGEGHILLNGEMINQLAVGDRYKYLGVHESGKIEHSIIKDQLCKDYFKRLKKLLNTHLNSRCLIKGVNSYAIPVLLYSFGVINYKSSDLQKIDTKTRKLLAIKKAHQQKADVQRLYLPVAQGGRGLLNVEYMYKAQIVKYKQYLEAESDHLIKAIVEHDIHRDKYSVINEAKEIEGQLYLGRGVMHTDKQIKEAILKKHNEMWRSKQLHGQFPNKVLDQANIDTELSFKWIKKQQISPTIESSIFAIQDQAILTRQHQRDILKEPIDGKCRLCACKDETTQHIISGCEKLAGTYYVKRHNNLVQYVYWCLAKKHKIEVSNLWWKETLLQPQVKENEYTKILWEMPVHTDVTVTHNRPDLIYVDKVNNKTYLIDITVPSDYNIGAKEIEKLSKYHLLKTEVSRLWNTQTTVIPIVIGATGIVAKSIKKYVDKLDTCIDISILQKQAAIHSSTILSKVLGDTVFVNNTQDFHIPNTEQSTHTQQATHTQPIAHTQQTSITQQLSSTPETSNTSHTQNTQRPPNTRQRNRRGRRRATFHTQQTP

SEQ ID NO: 32009 - protein, 1292 aa, Timochares trifasciata
MEKSLRRYRKGPLPGGDRQGTSGAGAGRDSMQTVSDSLLNRRARVGGPENITADHRGGEGTDGALQGRASPTDSVGSSVTTTSNRISDDRRRKWSTEELGELMFCYFKARSEGAGYIERLHKLFSERNPNNPKIHNFNGNTLSNQARRIIKQSVISQELLDRIQKQAEGKMDTVESSEQNVTEEDEEATNYSHLNITHNIEHVEYSTEQIQAIDQLAQNIEVNEDQDPLILNFLQILSETNETRIEERQLLPKAKINKSFVSNLCTLNKFLPSILASNNSLREINNIIYAVAKTLIVNNNQVPYTPKSTFSMRSDPPWKRRIKTKIEKFRKELGQLIEIGRGINTRRMIKIKDKLYSQHNIQNDNDHRNIEEMLKQKIKALAARIKRYEEINDRKEQNSLFSENEHKLYRSLGGNSFKDIKLPNKEVVEEFWSSILSNPIHYNSEAKWIREVEASTSEVSTVDVEQISEEHIKHATQKLLNWKTPGIDKIQNYYLKYLTSVHSYLASTFSRIVLRKETLEEWFTTGQVILIPKNEQTEDPKNWRPIACLPTMYKLLSSVLSNILYSHCHQNNIIAIEQRGCRRGARGCKDHLMVNKAILEDAHQCQKNLSMAWIDYQKAFDSVPHEWLAKVLDIYKCPSIIKRFLELVMPSWRVIMTARGIDNSLTTKPINIRCGIFQGDSLSPLLFCLAMNPLSFVLNKYEMKGYKLKDSLWINHLLYMDDLKLYANNRHNLKVLLDSVEIFTRDIGMRFGLDKCNTIHISSGYRNKVTGEGHILLGGEIIKQLGTGDRYKYLGIHESGKIEHSVIRDQIVKEYFKRVKKLLDTYLNSRNLIKGINTYAVPVLLYSFGIINYKNSDLKKIDTKTRKLLAIKKIHQQKAEVERLYLPVTQGGRGLLNIEYMYNTQIVKYKQYLKAEGDELIKAIVEHDVHRDKYSILKEAEEIETHLNLASGNRHTDKDIREAIVKRSKEVWRNKHLHGQFIKKVLEQTNIDTQLSFRWIKKQKISPALESSIFAIQDQCIMTQQHRRDILKEPVDGKCRLCACKDETTQHIVSGCEKLAGNYYVKRHNNLVQYVYWCLAKKHNIEVSSTWWKETLLQPQVKENETAKILWEMPVHTDVTITHNRPDLIYVDKINNKTYLIDVAVPSDYNIGPKEIEKLSKYHLLKNEVNRLWKTQATIIPIVVGATGVVGKNIQKYIEKLGTFIDITILQKQAAIHSSTILSKVLGDTVFVNNAQNNDTLNTETPTLLVQSPNTQSISTQFITSTADPMTGQTQRCTQRTSKRGRESRKKT

SEQ ID NO: 32010 - protein, 1313 aa, Phalera bucephala
MERQLSNERLGPLPGGDRRGTSGADAGRDSMQTVSDSLLNRRVRVGGPENITADQRGGEGTDGALQSRASPTNSVGSSETTTHMELSDDKRRKWSTDELKELMFCYFKARAGGPGYIGRLQELFAERNPNNPKIHKFNGNTLSNQARRIIKQNVISQELLNCIQKQAEGIIEVQNIQSSEQNVNEVEEHNTMSLHNTISQNTQHIESYTVEQAETIDNFTQNIQVNEDQDPLILNFLQILAETKETSVEDRLLLPKAKINRLFLENFNKINTYLPNILITNNSLRDINDIIYAAAKTLIINNNQTPYIPKNTIKAKTDPPWKRRIQFKIDTYRKELGQLIEIERGTNTRRMMNIKDKLYRKHNIQSENDHRNIVEILKQKVKALAGRIKRYDNINSRKEQNNLFHENEHKFYRSLGGNNIKEVKLPNKERVEEFWASILSIPVEYNNEARWIQEVEVSSNEVNTTDIQEISEDQIKFAVRKLLNWKSPGIDKIQNYYIKYFTSVHSYLASLFTKIVTQRETLEEWFTTGQVILIPKNEHTEDPKNWRPIACLPTMYKLLTSVLANILYKHCHENNIMAAEQRGCHRGVRGCKDHLMVNKAILEDAHQSQKNLSMAWIDYQKAFDSVSHEWLIKVLDVYKCPPMIKRFLELVMPAWRVIMTARGSQNSLTTEPITIRRGIFQGDSLSPLLFCLAINPLSFVLNKYEMKGYKLKDSFWINHLLYMDDLKMYANNKHNLKVLLDSVEIFTSDIGMRFGLDKCNIIHISSGHRSSVTGEGHILLNGEMINQLAVGDKYKYLGVHESGKIEHSIVKDQLCKEYFKRLKKLLNTHLNSRCLIKGINTYAIPVLLYSFGVINYKSSDLQKIDTKTRKLLAIKKAHQQKADVQRLYLPVAQGGRGLLNVEYMYKSQIIKYKQYLEAESDHLIKAIVEHDIHRDKYSVISEAKEIEGQLYLGRRVIHTDKQIKEAILKKHNEMWRNKQLHGQFPKKVLDQANIDIELSFKWIKKQQISPTIESSIFAIQDQAILTRQHQRDILKEPIDGKCRLCACKDETTQHIISGCEKLAGTYYVKRHNNLVQYVYWCLAKKHKIEVSNLWWKETLIQPQVKENEYTKILWEMPVHTDITVTHNRPDLIYVDKVNNKTYLIDITVPSDYNIGAKEIEKLSKYHLLKTEVSRLWNTQTTVIPIVIGATGIVAKSIKKYIDKLDTCIDISILQKQAAIHTSTILSKVLGDTVFVNNTQDSHTPNTEQSSHTQQATHTQPIAHTQQTSITQQLPSTPETSNTSHTHNTQRPPHTRLRNRRGRRRAIFHTQQTP

SEQ ID NO: 32011 - protein, 1234 aa, Quadrus cerialis
MKRRIMHGRLGPLPGGDRRGTSGADAGRDSMQTVSDSLLNRRARVGGPENITAEQGEEDKIDDALQSRASPTDSVGSSVTTTYNAISDDRRRKWSTEELQELMFCYFKARINGAGYIDRLHKLFAERNPNNPKIHKFNGNTLSNQARRVLKQNVLSQELLDRLQKHAEGTLQEIENLNQEVVEDQTMPHSVDTTQNTHHIEYTTEQAQTIDHITQNIEVNEDQDPLILNFLQVLSETKETNIEDRPLLPKAKINKYFIENLNKLNKYLPNVLLTNDSLREINNIIYAVAKTLITQNNQSPYVLRNTVKKKTMPPWKRRIQTKIEAFRKELGQLIEIGKGINTRRMTKIKNKLYSKYNIHNENDHKNTQEILTQKIKALAGRIKRYEDINSRKAQNNVFSENEHKFYRALGGGEVKDITLPDKETVEEFWSSILSNPIQYNDKAKWIEEVEASSSEFNTIDIEEITEEQIKIAIKKLLNWKMPGIDKIQNYYLKYLTSVHRYLATLFTKIVTQKETIEEWFTTGQVILVPKNQHTEDPKNWRPIACLPTIYKLLTSVLANILYNHCHQNNIIAIEQRGCRRGCRGCKDHLMVNKAILEDAHQSQKNLSMAWIDYQKAFDSVSHEWLTKVLDVYKCPLIIKTFLQLVMPTWKVVMTARGTRNSLNTEPIYVRRGIFQGDSLSPLLFCLAINPLSFILNKYEMKGYKLKDSMWINHLLYMDDLKIYSNNKHNLKVLVDSVEIFTNDIGMKFGLDKCNVVHMSSGHRSNVEGNGHILLDGNMIKELAIGEKYKYLGIHESGKIEHSVIRDHVTKEYFKRIKKLLNTHLNSRNLIKGINTYAIPVLLYSFGVINYKNSDLKKIDTKTRKLLALNKVHQQKAEVERLYLPIIQGGRGLLNIENMYKKQVIKYKQYLETESDDILKAIVEHDKQKEKYSIIKEAQKVESELHLAQREIHTDKEISVAIIKRCKEIWRSKQLHGQFPKKVLDQANVDTEQSFKWIKKQQISPSIESSIFAIQDQAIMTRQHRRDILKEPVDGKCRLCGSKDETTQHIISGCEKLAGTYYVKRHNNLVQYVYWCLARKHKIDVSSFWWKETLTQPQVQENDTAKIMWEMPVQTDITITHNRPDLIYIDKTNNKTYLIDVTVPSDYNIGPKEIEKLSKYHLLRNELTRLWKTQTSVIPIVVGATGIVAKSIKRYTLTSASYLKNRQPYIHQLYSVKSLEIFSPILHYRIHSEQP

SEQ ID NO: 32012 - protein, 1036 aa, Oechydrus chersis
MPKNNNKIKSDPPWKKRIQTKIEIFRKELGQLIEITRGINTPRMIKIKDKLYRKHNIETKTDHKNIEEILKQKIKALAGRIKRYESINTTKEQNTLFTESENKLYRKLGGKDFKDIELPNKETVEEFWSAILSNPIQYNCEAQWINEVESASNEVTTTDIEEISEEQIQYAIKKLLNWKSPGIDKIQNYYLKYLTSLHASLASLFTKIVTNRETLEDWFTTGQVILIPKNENTEDPKNWRPIACLPTIYKLLTSVLSNILYNHCHQNNIMSIEQRGCRRGVRGCKDHLMVNKAILEDAHQSQKNLSMAWIDYQKAFDSVSHEWLTKVLDVYKCPPIIKRFLKLVMPSWKVIMTARGTQNSLTTNPISIKRGIFQGDSLSPLLFCLAINPLSSILNKYEMKGYKLKDSIWINHLLYMDDLKIYANNTYNLKVLLDSVEIFTNDIGMKFGLDKCNTLHISSGHRSNVTGDGHVLLGGDVIKQLSTGDRYKYLGVHESGKIDHSVIKDQITKEYFKRTKQLLNTHLKSRYLIKGINTYAIPVLSYSFGVINYKNSDLKKIDTKTRKLLAMKKAHQQKSEVERLYLPISQGGRGLCNVEYMYKTQIVKYKQYLQAESDDLIKAIVEHDIHRDKYSIINEAQEIENNLQLTRGNTHTDKSLREAIVKMRNDRWRAKQLHGQFPKKVLDLRNIDREMSFIWYKKQQISPSIESSIFAIQDQAVMTRQHQRDILKLDVDGKCRLCSCKDETTQHIISGCEKLAGTYYVKRHNNLVQYVYWCLARKHKIEVAKLWWQETLTQPQTLENNYAKILWEMPVQTDITVTHNRPDIIYTDKQNNKTYLIDVSVPTDYNIGAKEIEKLSKYHLLKTEITRLWNTHTVIVPIIIGATGIVAKSISKYIQSLNANIDISILQKQAAIHTSVILSKVLGDTVFVHNTQNENIESSRTAHQTSTQPSPNAPISQNTINVQSSSTTNQIVTQPTLNTAITQDATSTPTIEQTSTTQQRRQRRNTRNTSSNNTQHSLTHSHTYTSPNKRRLRPRK

SEQ ID NO: 32013 - protein, 953 aa, Pyrrhopyge telassa
MTKIKDKLYRQYNIQNENEHRNTEETLKQKIMALAGRIKRYEDINSRKKQNSLFNENEHKLYRSLGSNSFKDIKLPDKEIVKEFWSSILSNPVHYNSKAKWIKEIEMTSSEINTIDIKEISEEHIKYAIKKLLNWKTPGIDKIQNYYLKYFTSVHSYLGSTFTKMVSDKESLEEWFTTGQVILIPKNEQTEDPKNWRPIACLPTMYKLLSSVLSNILYEHCHQNNIIAIEQRGCRRGARGCKDHLMVNKAILEDSHQSQKNLSMAWIDYQKAFDSVPHEWLVKVLDVYKCPPIIKRFLEIAMPSWKVVMTARGANSSLTTEPIYVRRGIFQGDSLSPLLFCLAINPLSFILNKYEMKGYKLKDSLWINHLLYMDDLKIYANNSHNLKVLLDSVEIFTRDIGMRFGLDKCNTIDINSGRRNKVTGEGHILLEGDIIEQLAIGDRYKYLGIHESGKIEHSVVRDHITKEYFKRIKKLINTHLNSRNLIKGINTYAIPVLMYSFGVINYKNSDLKKIDTKTRKLLAIKKAHQQKAEVERLYLPVTQGGRGLLNVEYMYKTQIVKYKQYLKAEGDELIKAIVTHDTHRDKYSIIKEAQEIENQLHLARKDKHTDKDIREAIVKKCKDIWRNKQLHGQFIRNVLDQTNIDTELSFKWIKKQQISPTIESSIFAIQDQAIVTRQHRRDILKEPIDGKCRLCACKDETTQHIISGCEKLAGNYYIKRHNNLVQYVYWCLAKKHKIEVSNFWWKETLIQPQVKENENVKILWEMPVQTDVTITHNRPDLIYIDKTNNRTYLIDVTVPSDYNIGPKEIEKLSKYHLLKNEVSRLWKTQATIIPIVIGATGIVGKNVKKYIEKLDTFIDITILQKQAAINSSVILSKVLGDTVFVNNTQNTQNTDQPIHSVQASHIQNIPEQLLTNTTDSTIQHLTNTGAPHCSREREGMQQRIVRRRGRIVK

SEQ ID NO: 32014 - protein, 1297 aa, Pyrrhopyge aziza
MERQFRKRTLGPLPGGDRRGTSGADAGRDSMQTVSDSLLNRRARVGRPENTTADQRGGEGTDDALQSRATPTDSVGSSVSTTNNAISDDRRRKWSTEELQELMFCYFKARLDGVGYIDRLHTIFTERNPGNPKIHKFNGNTLANQARRIIKQNVISQELLDRIQKRAEGRIDTVENLDQNVVEEEATAPRNIITPSTHHIDYSIEQIESIDRLTQNIEVNEDQDPLILNFLQILSETKETVIEERLLLPKAKINKRFLENLCKLNKFLPNILATNHSLRDINNIIYAAAKTLIINNNQKPYTPKNTFKNKFDPPWKKRIQTKIEKFRKELGQLIELGRGNITRRMTKIKDKLYRQYNIQNENEHRNTEETLKQKIKALAGRIKRYEDINSRKKQNSLFNENEHKLYRSLGSNSFKDIKLPDKEIVKEFWSSILSNPIQYNSKAKWIKEIEMTSSDINTIDIKEISEEHIKYAIKKLLNWKTPGIDKIQNYYLKYFTSVHSYLGSTFTKIVSDKEPLEEWFTTGQVILIPKNEQTEDPKNWRPIACLPTMYKLLSSVLSNILYEHCHQNNIIAIEQRGCRRGARGCKDHLMVNKAILEDAHQSQKNLSMAWIDYQKAFDSVPHEWLVKVLDVYKCPPIIKRFLETAMPSWKVVMTARGTNNSLTTEPIYVRRGIFQGDSLSPLLFCLAINPLSFILNKYEMKGYKLKDSLWINHLLYMDDLKIYANNSHNLKVLLDSVEIFTRDIGMRFGLDKCNTIDINSGRRNKVTGEGHILLEGDIIEQLAIGDRYKYLGIHESGKIEHSVVRDHITKEYFKRIKKLTNTHLNSRNLIKGINTYAIPVLLYSFGVINYKNSDLKKIDTKTRKLLAIKKAHQQKAEVERLYLPVTQGGRGLLNVEYTYKAQIIKYKQYLKAEGDELIKAIVTHDTHRDKYSIIKEAQEIENQLHLARKDKHTDKDIREAIVKKCKDIWRNKQLHGQFIRNVLDQSNIDTELSFKWIKKQQISPTIESSIFAIQDQAIVTRQHRRDILKEPIDGKCRLCACKDETTQHIISGCEKLAGNYYIKRHNNLVQYVYWCLAKKHKIEVSNFWWKETLIQPQVKENENVKILWEMPVQTDVTITHNRPDLIYIDKTNNRTYLIDVTVPSDYNIGPKEIEKLSKYHLLKNEVSRLWKTQATIIPIVIGATGIVGKNVKKYIEKLDTFIDITILQKQAAINSSVILSKVLGDTVFVNNKQNTQNTEQPTHSEQASHIQNIPEQLLTNTTDSTIQHLTNTGVPHCSREREGMQQRIVRRRGRIVK

SEQ ID NO: 32015 - protein, 1325 aa, Pyrrhopyge haemon
MPREGRTLETLRVRYTPMTNGALVTFVNMERQFRKRTRGPLPGGDRRGTFGADAGRDSMQTVSDSLLNRRARVGRPENTTADQRGGKGTDDALQSRATPTDSVGSSVSITNNAISDDRRRKWSTEELQELMFCYFKARLDGVGYIDRLHKFFTERNPSNPKVHKFNGNTLANQARRIIKQNVISQELLDRIQKHAEGRIDTVENLDQNVVEEEATAPPNIITPSTHHKNYSIEQIESLDRLIQNIEVNEDQDPLILNFLQILSETKETVIEERLLLPKAKINKRFLENLCKLNKFLPNILATNNSLRDINNIIYAAAKTLIINNNQIPYTPKNTFKNKCDPPWKKRIRTKIEKFRKELGQLIELGRGNITRRMTKIKDKLYRQYNIRNENEHRNIEETLKQKIMALAGRIKRYEDINSRKKQNSLFNENEHKLYRSLGSNSFKDIKLPDKEIVKEFWSSILSNPIHYNSKAKWIKEIEMTSSEINTINIKEISEDHIKYAIKKLLNWKTPGIDKIQNYYLKYFTSVHRYLGSTFTKMVSDKETLEEWFTTGQVILIPKNEQTEDPKNWRPIACLPTMYKLLSSVLSNILYEHCLQNNIIAIEQRGCRRGARGCKDHLMVNKAILEDAHQSQKNLSMAWIDYQKAFDSVPHEWLVKVLDVYKCPPIIKRFLEIVMPSWKVVMTARGANNSLTTEPIYVRRGIFQGDSLSPLLFCLAINPLSFILNKYEMKGYKLKDSIWINHLLYMDDLKIYANNRHNLKVLLDSVEIFTRDIGMRFGLDKCNTIHINSGRRNKVTGEGHILLEGDIIEQLAIGDRYKYLGIHESGKIEHSVVRDHITKEYFKRIKKLINTHLNSRNLIKGINTYAIPVLMYSFGVINYKNSDLKKIDTKTRKLLAIKKVHQQKAEVERLYLPVTQGGRGLLNVEYMYKTQIIKYKQYLKAEGDELIKAIVTHDTHRDKYSIIKEAQEIENQLQLAREDKHTDNDIREAIVKKCKDIWRNKQLHGQFIRNVLDQTNIDTELSFKWIKKQQISPTIESSIFAIQDQAIVTRQHRRDILKEPIDGKCRLCACKDETTQHIISGCEKLAGNYYIKRHNNLVQYIYWCLAKKHKIEVSDFWWKETLIHPQVKENENVKILWEMPVQTDVTIIHNRPDLIYIDKTNNRTYLIDVTVPSDYNIGPKEIEKLSKYHLLKNEVSRLWKTQAIIIPIVIGATGIVGKNVKKYIEKLDTFIDITILQKQAAINSSTILSKVLGDTVFVNNTQNAQNTEQPIHSVQASNIQNIPEQLLTNTTDSTVQHLTNTGAPYCPRERGSMQQRIVRRRGRTVK

SEQ ID NO: 32016 - protein, 1313 aa, Phalera bucephala
MERQLSNERLGPLPGGDRRGTSGADAGRDSMQTVSDSLLNRRVRVGGPENITADQRGGEGTDGALQSRASPTDSVGSSETTTHMELSDDRRRKWSTDELKELMFCYFKARAGGPGYIGRLQELFAERNPNNPKIHKFNGNTLSNQARRVIKQNVISQELLNCIQKQAEGIIEVQNIQSSEQNVNEVEEHNTMSLHNTISQNIQHIESYTVEQAETIDNYTQNIQVNEDQDPLILNFLQILAETKETSVEGRLLLPKAKINRLFLENLNKINTYLPNILITNNSLRDINDIIYAAAKTLIINNNQTPYIPKNTIKAKTDLPWKRRIQFKIDTYRKELGQLIEIERGTNTRRMMNIKDKLYRKHNIQSENDHRNIVEILKQKVKALAGRIKRYDNINSRKEQNNLFHENEHKFYRSLGGNNIKEVKLPNKERVEEFWSSILSIPVEYNNEARWIQEVEVSSNEVNTTDIQEISEDQIKFAVRKLLNWKSPGIDKIQNYYIKYFTSVHSYLASLFTKIVTQRETLEEWFTTGQVILIPKNEHTEDPKNWRPIACLPTMYKLLTSVLANILYKHCHENNIMAVEQRGCRRGVRGCKDHLMVNKAILEDAHQSQNNLSMAWIDYQKAFDSVSHEWLIKVLDVYKCPPMIKKFLQLVMPAWRVVMTARGSQNSLTTEPITIRRGIFQGDSLSPLLFCLAVNPLSFVLNKYEMKGYKLKDSFWINHLLYMDDLKIYANNKHNLKVLLDSVEIFTSDIGMRFGLEKCNIIHISSGHRSSVTGEGHILLNGEMINQLAVGDRYKYLGVHESGKIEHSIIKDQLCKEYFKRLKKLLNTHLNSRCLIKGVNSYAIPVLLYSFGVINYKSSDLQKIDTKTRKLLAIKKAHQQKADVQRLYLPVAQGGRGLLNVEYMYKAQIVKYKQYLEAESDHLIKAIVEHDIHRDKYSVINEAKEIEGQLYLGRGVMHTDKQIKEAILKKHNEMWRSKQLHGQFPNKVLDQANIDTELSFKWIKKQQISPTIESSIFAIQDQAILTRQHQRDILKEPIDGKCRLCACKDETTQHIISGCEKLAGTYYVKRHNNLVQYVYWCLAKKHKIEVSNLWWKETLLQPQVKENEYTKILWEMPVHTDVTVTHNRPDLIYVDKVNNKTYLIDITVPSDYNIGAKEIEKLSKYHLLKTEVSRLWNTQTTVIPIVIGATGIVAKSIKKYVDKLDTCIDISILQKQAAIHTSTILSKVLGDTVFVNNTQDFHIPNTEQSTHTQQATHTQPIAHTQQTSITQQLSSTPETSNTSHTQNTQRPPNTRQRNRRGRRRATFHTQQTP

SEQ ID NO: 32017 - protein, 1313 aa, Phalera bucephala
MERQLSNERLGPLPGGDRRGTSGADAGRDSMQTVSDSLLNRRVRVGGPENITADQRGGEGTDGALQSRASPTDSVGSSETTTHMELSDDRRRKWSTDELKELMFCYFKARAGGPGYIGRLQELFAERNPNNPKIHKFNGNTLSNQARRIIKQNVISQELLNCIQKQAEGIIEVQNIQSSEQNVNEVEEHNTMSLHNTISQNIQHIESYTVEQAETIDNYTQNIQVNEDQDPLILNFLQILAETKETSVEDRLLLPKAKINRLFLENLNKINTYLPNILITNNSLRDINDIIYAAAKTLIINNNQTPYIPKNTIKAKTDPPWKRRIQFKIDTYRKELGQLIEIERGTNTRRMMNIKDKLYRKHNIQSENDHRNIVEILKQKVKALAGRIKRYDNINSRKEQNNLFHENEHKFYRSLGGNNIKEVKLPNKERVEEFWSSILSIPVEYNNEARWIQEVEVSSNEVNTTDIQEISEDQIKFAVRKLLNWKSPGIDKIQNYYIKYFTSVHSYLASLFTKIVTQRKTLEEWFTTGQVILIPKNEHTEDPKNWRPIACLPTMYKLLTSVLANILYKHCHENNIMAVEQRGCRRGVRGCKDHLMVNKAILEDAHQSQKNLSMAWIDYQKAFDSVSHEWLIKVLDVYKCPPMIKKFLQLVMPAWRVVMTARGSQNSLTTEPITIRRGIFQGDSLSPLLFCLAVNPLSFVLNKYEMKGYKLKDSFWINHLLYMDDLKIYANNKHNLKVLLDSVEIFTSDIGMRFGLEKCNIIHISSGHRSSVTGEGHILLNGEMINQLAVGDRYKYLGVHESGKIEHSIIKDQLCKEYFKRLKKLLNTHLNSRCLIKGVNSYAIPVLLYSFGVINYKSSDLQKIDTKTRKLLAIKKAHQQKADVQRLYLPVAQGGRGLLNVEYMYKAQIVKYKQYLEAESDHLIKAIVEHDIHRDKYSVINEAKEIEGQLYLGRGVMHTDKQIKEAILKKHNEMWRSKQLHGQFPNKVLDQANIDTELSFKWIKKQQISPTIESSIFAIQDQAILTRQHQRDILKEPIDGKCRLCACKDETTQHIISGCEKLAGTYYVKRHNNLVQYVYWCLAKKHKIEVSNLWWKETLLQPQVKENEYTKILWEMPVHTDVTVTHNRPDLIYVDKVNNKTYLIDITVPSDYNIGAKEIEKLSKYHLLKTEVSRLWNTQTTVIPIVIGATGIVAKSIKKYVDKLDTCIDISILQKQAAIHTSTILSKVLGDTVFVNNTQDFHIPNTEQSTHTQQATHTQPIAHTQQTSITQQLSSTPETSNTSHTQNTQRPPNTRQRNRRGRRRATFHTQQTP

SEQ ID NO: 32018 - protein, 1313 aa, Phalera bucephala
MERQLSNERLGPLPGGDRRGTSGADAGRDSMQTVSDSLLNRRVRVGGPENITADQRGGEGTDGALQSRASPTDSVGSSETTTHMELSDDRRRKWSTDELKELMFCYFKARAGGPGYIGRLQELFAERNPNNPKIHKFNGNTLSNQARRIIKQNVISQELLNCIQKQAEGIIEVQNIQSSEQNVNEVEEHNTMSLHNTISQNIQHIESYTVEQAETIDNYTQNIQVNEDQDPLILNFLQILAETKETSVEDRLLLPKAKINRLFLENLNKINTYLPNILITNNSLRDINDIIYAAAKTLIINNNQTPYIPKNTIKAKTDPPWKRRIQFKIDTYRKELGQLIEIERGTNTRRMMNIKDKLYRKHNIQSENDHRNIVEILKQKVKALAGRIKRYDNINSRKEQNNLFHENEHKFYRSLGGNNIKEVKLPNKERVEEFWSSILSIPVEYNNEARWIQEVEVSSNKVNTTDIQEISEDQIKFAVRKLLNWKSPGIDKIQNYYIKYFTSVHSYLASLFTKIVTQRETLEEWFTTGQVILIPKNEHTEDPKNWRPIACLPTMYKLLTSVLANILYKHCHENNIMAVEQRGCRRGVRGCKDHLMVNKAILEDAHQSQKNLSMAWIDYQKAFDSVSHEWLIKVLDVYKCPPMIKKFLQLVMPAWRVVMTARGSQNSLTTEPITIRRGIFQGDSLSPLLFCLAVNPLSFVLNKYEMKGYKLKDSFWINHLLYMDDLKIYANNKHNLKVLLDSVEIFTSDIGMRFGLEKCNIIHISSGHRSSVTGEGHILLNGEMINQLAVGDRYKYLGVHESGKIEHSIIKDQLCKEYFKRLKKLLNTHLNSRCLIKGVNSYAIPVLLYSFGVINYKSSDLQKIDTKTRKLLAIKKAHQQKADVQRLYLPVAQGGRGLLNVEYMYKAQIVKYKQYLEAESDHLIKAIVEHDIHRDKYSVINEAKEIEGQLYLGRGVMHTDKQIKEAILKKHNEMWRSKQLHGQFPNKVLDQANIDTELSFKWIKKQQISPTIESSIFAIQDQAILTRQHQRDILKEPIDGKCRLCACKDETTQHIISGCEKLAGTYYVKRHNNLVQYVYWCLAKKHKIEVSNLWWKETLLQPQVKENEYTKILWEMPVHTDVTVTHNRPDLIYVDKVNNKTYLIDITVPSDYNIGAKEIEKLSKYHLLKTEVSRLWNTQTTVIPIVIGATGIVAKSIKKYVDKLDTCIDISILQKQAAIHSSTILSKVLGDTVFVNNTQDFHIPNTEQSTHTQQATHTQPIAHTQQTSITQQLSSTPETSNTSHTQNTQRPPNTRQRNRRGRRRATFHTQQTP

SEQ ID NO: 32019 - protein, 1325 aa, Nerula fibrena
MANGALVTCMKMERQTVKHCTQGPLPGGDRRGTSGADAGRSSMQTVSGSLLNRRAGVGEPENITADQRGGEGTDDVLQSRASPTDSVGSSVSTTNNAINDDRRRKWSTEELEELMFCYFKSRQDGPGYIGRLQKLFTERNPDNPKIHKFNGNTLSNQARRVIKQNVISQELLDRIQKRVEGVMEVVENSEQNLVELEHSSIRISSTITQNTPQIEYTTEQAQIIDQLTQNVQVNEDQHPLILHFLQILIETKETPIVERQFLPKAKINKRFIENLTILNKYLPNILVTNNSLRDINNVIYATAKTLIINNNQSPYLPKNNYNIKSDPPWKKRIQTKIEIFRKELGQLIELNRGINTPRMIKIKDKLYAKHNIQNENDHKNVEEILKQKIKALAGRIKRYESINSTKEQNKLFSESEHKLYRKLGGNNLNDIKLPNKETIEEFWSDILSKPIQYNCEAQWIKEVEISSNEVTTADIEEISEEQIKYAIRKLLNWKSPGIDKIQNYYLKYLTSAHAYLASLFTKIVTRREPLEDWFTTGQVILIPKNEHTEDPKNWRPIACLPTIYKLLTSVLSNILYNHCHQNNIMSIEQRGCRRGVRGCKDHLMVNKAILEDAHKSQKNLSMAWIDYQKAFDSVSHEWLTKVLDVYKCPPMIKRFLKLVMPSWKVIMTARGTQNSLTTNPISIRRGIFQGDSLSPLLFCLAINPLSFVLNKYEMKGYKLKDSIWINHLLYMDDLKIYANNTYNLKVLLDSVEIFTNDIGMKFGLDKCNILHISSGHRSNVTGEGHVLLGGDIIKQLSVGDRYKYLGVHESGKIDHSVIKDQITKEYFKRIKQLLNTHLKSRYLIKGINTYAIPVLSYSFGVIHYKNNDLKKIDTKTRKLLAIKKAHQQKAEVERLYLPLSQGGRGLCNVEYMYKTQIVKYKQYLQAESDDLIKAIIEHDMHRDKYSIVKEAQEIENDLHLAQGSTHTDKQIREAIVKKQNESWRAKQLHGQFPKKVLDLMNIDREMSFKWIKKQQITPSIESAIFAIQDQAVMTRQHQRDILKSEIDGKCRLCACRDETTQHIISGCEKLAGTYYVKRHNNLVQYVYWCLARKHKIEVAKLWWQETLTQPQTTENDAAKILWEMPVQTDITVTHNRPDIIYMDKKNNKTYLIDVSVPTDYNIGAKEIEKLSKYHLLKTEITRLWNTHTVIVPIIIGATGIVAKSINRYIQSLNANIDISILQKQAAIHTSIILSKVLGDTVFVHNTQDPNTQSPRTAHQTHTRTITQSTPNTPISENSTSIQEPCTTHQIITLSTPNTIISQMATNTQASSTTHQMTTQPTLNTL

SEQ ID NO: 32020 - protein, 1325 aa, Pyrrhopyge hadassa
MPREGRTLETLRVRYTPMTNGALVTFVNMERQFRKRTLGPLPGGDRRGTSGADAGRDSMQTVSDSLLTRRARVGRPENTTADQRGGEGTDDALQSRATPTDSVGSSVSTTNNAISDDRRRKWSTEELQELMFCYFKARLDGVGYIDRLHTIFSERNPGNPKIHKFNGNTLSNQARRIIKQNVISQELLDRIQKRAEGRIDTVESLDENVVEEEATAPRNIITPSTHHIDYSIEQIESIDQLTQNIEVNEDQDPLILNFLQILSETKETVIEERLLLPKAKINKRFLENLCKLNKFLPNILATNHSLRDINNIIYAAAKTLIINNNQKPYTPKNTFKNKFDPPWKKRIQTKIEKFRKELGQLIELGRGNITRRMTKIKDKLYRQYNIQNENEHRNTEETLKQKIKALAGRIKRYEDINSRKKQNSLFNENEHKLYRSLGSNSFKDIKLPDKEIVKEFWSSILSNPIHYNSKAKWIKEIEMTSSDINTIDIKEISEEHIKYAIKKLLNWKTPGIDKIQNYYLKYFTSVHSYLGSTFTKIVSDKESLEEWFTTGQVILIPKNEQTEDPKNWRPIACLPTMYKLLSSVLSNILYEHCHQNNIIAIEQRGCRRGARGCKDHLMVNKAILEDAHQSQKNLSMAWIDYQKAFDSVPHEWLVKVLDVYKCPPIIKRFLEIAMPSWKVVMTARGANNSLTTEPIYVRRGIFQGDSLSPLLFCLAINPLSFILNKYEMKGYKLKDSLWINHLLYMDDLKIYANNSHNLKVLLDSVEIFTRDIGMRFGLDKCNTIDISSGRRNKVTGEGHILLEGDIIEQLAIGDRYKYLGIHESGKIEHSVVRDHITKEYFKRIKKLINTHLNSRNLIKGINSYAIPVLMYSFGVINYKNSDLKKIDTKTRKLLAIKKAHQQKAEVERLYLPVTQGGRGLLNVEYMYKTQIVKCKQYLKAEGDELIKAIVTHDTHRDKYSIIKEAQEIENQLHLARKDKHTDKDIREAIVKKCKDIWRNKQLHGQFIRNVLDQTNIDTELSFKWIKKQQISPTIESSIFAIQDQAIMTRQHRRDILKEPIDGKCRLCACKDETTQHIISGCEKLAGNYYIKRHNNLVQYVYWCLAKKHKIEVSNFWWKETLIQPQVKENENVKILWEMPVQTDVTITHNRPDLIYIDKTNNRTYLIDVTVPSDYNIGPKEIEKLSKYHLLKNEVSRLWKTQATIIPIVIGATGIVGKNVKKYIEKLDAFIDITILQKQAAINSSVILSKVLGDTVFVNNTQNTQNTEQPIHSEQASHIQNIPEQLLTNTTDSTIQHLTNTGAPHCSREREGAQQRIVRRRGRIVK

SEQ ID NO: 32021 - protein, 1313 aa, Phalera bucephala
MERQLSNERLGPLPGGDRRGTSGADAGRDSMQTVSDSLLNRRVRVGGPENITADQRGGEGTDGALQSRASPTDSVGSSETTTHMELSDDRRRKWSTDELKELMFCYFKARAGGPGYIGRLQELFAERNPNNPKIHKFNGNTLSNQARRIIKQNVISQELLNCIQKQAEGIIEVQNIQSSEQNVNEVEEHNTMSLHNTISQNIQHIESYTVEQAETIDNYTQNIQVNEDQDPLILNFLQILAETKETSVEDRLLLPKAKINRLFLENLNKINTYLPNILITNNSLRDINDIIYAAAKTLIINNNQTPYIPKNTIKAKTDPPWKRRIQFKIDTYRKELGQLIEIERGTNTRRMMNIKDKLYRKHNIQSENDHRNIVEILKQKVKALAGRIKRYDNINSRKEQNNLFHENEHKFYRSLGGNNIKEVKLPNKERVEEFWSSILSIPVEYNNEARWIQEVEVSSNKVNTTDIQEISEDQIKFAVRKLLNWKSPGIDKIQNYYIKYFTSVHSYLASLFTKIVTQRETLEEWFTTGQVILIPKNEHTEDPKNWRPIACLPTMYKLLTSVLANILYKHCHENNIMAVEQRGCRRGVRGCKDHLMVNKAILEDAHQSQKNLSMAWIDYQKAFDSVSHEWLIKVLDVYKCPPMIKKFLQLVMPAWRVVMTARGSQNSLTTEPITIRRGIFQGDSLSPLLFCLAVNPLSFVLNKYEMKGYKLKDSFWINHLLYMDDLKIYANNKHNLKVLLDSVEIFTSDIGMRFGLEKCNIIHISSGHRSSVTGEGHILLNGEMINQLAVGDRYKYLGVHESGKIEHSIIKDQLCKQYFKRLKKLLNTHLNSRCLIKGVNSYAIPVLLYSFGVINYKSSDLQKIDTKTRKLLAIKKAHQQKADVQRLYLPVAQGGRGLLNVEYMYKAQIVKYKQYLEAESDHLIKAIVEHDIHRDKYSVINEAKEIEGQLYLGRGVMHTDKQIKEAILKKHNEMWRSKQLHGQFPNKVLDQANIDTELSFKWIKKQQISPTIESSIFAIQDQAILTRQHQRDILKEPIDGKCRLCACKDETTQHIISGCEKLAGTYYVKRHNNLVQYVYWCLAKKHKIEVSNLWWKETLLQPQVKENEYTKILWEMPVHTDVTVTHNRPDLIYVDKVNNKTYLIDITVPSDYNIGAKEIEKLSKYHLLKTEVSRLWNTQTTVIPIVIGATGIVAKSIKKYVDKLDTCIDISILQKQAAIHSSTILSKVLGDTVFVNNTQDFHIPNTEQSTHTQQATHTQPIAHTQQTSITQQLSSTPETSNTSHTQNTQRPPNTRQRNRRGRRRATFHTQQTP

SEQ ID NO: 32022 - protein, 1313 aa, Phalera bucephala
MERQLSNERLGPLPGGDRRGTSGADAGRDSMQTVSDSLLNRRVRVGGPENITADQRGGEGTDGALQSRASPTNSVGSSETTTHMELSDDRRRKWSTDELKELMFCYFKARAGGPGYIGRLQELFAERNPNNPKIHKFNGNTLSNQARRIIKQNVISQELLNCIQKQAEGIIEVQNIQSSEQNVNEVEEHNTMSLHNTISQNTQHIESYTVEQAETIDNFTQNIQVNEDQDPLILNFLQILAETKETSVEDRLLLLKAKINRLFLENFNKINTYLPNILITNNSLRDINDIIYAAAKTLIINNNQTPYIPKNTIKAKTDPPWKRRIQFKIDTYRKELGQLIEIERGTNTRRMMNIKDKLYRKHNIQSENDHRNIVEILKQKVKALAGRIKRYDNINSRKEQNNLFHENEHKFYRSLGGNNIKEVKLPNKERVEEFWSSILSIPVEYNNEARWIQEVEVSSNEVNTTDIQEISEDQIKFAVRKLLNWKSPGIDKIQNYYIKYFTSVHSYLASLFTKIVTQRETLEEWFTTGQVILIPKNEHTEDPKNWRPIACLPTMYKLLTSVLANILYKHCHENNIMAVEQRGCRRGVRGCKDHLMVNKAILEDAHQSQKNLSMAWIDYQKAFDSVSHEWLIKVLDVYKCPPMIKKFLQLVMPAWRVVMTARGSQNSLTTEPITIRRGIFQGDSLSPLLFCLALNPLSFVLNKYEMKGYKLKDSFWINHLLYMDDLKIYANNKHNLKVLLDSVEIFTSDIGMRFGLEKCNIIHISSGHRSSVTGEGHILLNGEMINQLAVGDRYKYLGVHESGKIEHSIIKDQLCKEYFKRLKKLLNTHLNSRCLIKGVNSYAIPVLLYSFGVINYKSSDLQKIDTKTRKLLAIKKAHQQKADVQRLYLPVAQGGRGLLNVEYMYKAQIVKYKQYLEAESDHLIKAIVEHDIHRDKYSVINEAKEIEGQLYLGRGVMHTDKQIKEAILKKHNEMWRSKQLHGQFPNKVLDQANIDTELSFKWIKKQQISPTIESSIFAIQDQAILTRQHQRDILKEPIDGKCRLCACKDETTQHIISGCEKLAGTYYVKRHNNLVQYVYWCLAKKHKIEVSNLWWKETLLQPQVKENEYTKILWEMPVHTDVTVTHNRPDLIYVDKVNNKTYLIDITVPSDYNIGAKEIEKLSKYHLLKTEVSRLWNTQTTVIPIVIGATGIVAKSIKKYVDKLDTCIDISILQKQAAIHTSTILSKVLGDTVFVNNTQDFHIPNTEQSTHTQQATHTRPIAHTQQTSITQQLPSTPETSNTSHTQNTQRPPNTRQRNRRGRRRATFHTQQTP

SEQ ID NO: 32023 - protein, 1313 aa, Phalera bucephala
MERQLSNERLGPLPGGDRRGTSGADAGRDSMQTVSDSLLNRRVRVGGPENITADQRGGESTDGALQSRASPTDSVGSSETTTHMELSDDRRRKWSTDELKELMFCYFKARAGGPGYIGRLHELFAERNPNNPKIHKFNGNTLSNQARRIIKQNVKSQELLNCIQKQTEGIIEVQNIPSSEQNVNEVEEHNTMSLHNTISQNIQHIESYTVEQAETIDNFTQNIQVNEDQDPLILNFLQILAETKETSVEDRLLLPKAKINRLFLENLNKINTYLPNILITNNSLRDINDIIYAAAKTLVINNNQTPYIPKNTIKAKTDPPWKRRIQFKIDTYRKELGQLIEIERGTNTHRMMNIKDKLYRKHNIRSENDHRNIVEILKQKVKALAGRIKRYDHINSRKEQNNLFHENEHKFYRSLGGNNIKEVKLPNKERVEEFWSSILSIPVEYNNEARWIQEVEVSSNEVNTTDIQEISEDQIKFAVRKLLNWKSPGIDKIQNYYIKYFTSVHSYLASLFTKIVTQRETLEEWFTTGQVILIPKNEHTEDPKNWRPIACLPTMYKLLTSVLANILYKHCHENNIMAVEQRGCRRGVRGCKDHLMVNKAILEDAHQSQKNLSMAWIDYQKAFDSVSHEWLIKVLDVYKCPPMIKKFLQLVMPAWRVVMTARGSQNSLTTEPITIRRGIFQGDSLSPLLFCLAVNPLSFVLNKYEMKGYKLKDSFWINHLLYMDDLKIYANNKHNLKVLLDSVEIFTSDIGMRFGLEKCNIIHISSGHRSSVTGEGHILLNGEMINQLAVGDRYKYLGVHESGKIEHSIIKDQLCKEYFKRLKKLLNTHLNSRCLIKGVNTYAIPVLLYSFGVINYKSSDLQKIDTKTRKLLAIKKAHQQKADVQRLYLPVAQGGRGLLNVEYMYKAQIVKYKQYLEAESDHLIKAIVEHDIHRDKYSVINEAKEIEGQLYLGRGVMHTDKQIKEAILKKHNEMWRNKQLHGQFPKKVLDQANIDIELSFKWIKKQQISPTIESSIFAIQDQAILTRQHQRDILKEPIDGKCRLCACKDETTQHIISGCEKLAGTYYVKRHNNLVQYVYWCLAKKHKIEVSNLWWKETLIQPQVKENEYTKILWEMPVHTDITVTHNRPDLIYVDKVNNKTYLIDITVPSDYNIGAKEIEKLSKYHLLKTEVSRLWNTQTTVIPIVIGATGIVAKSIKKYIDKLDTCIDISILQKQAAIHTSTILSKVLGDTVFVNNTQDSHIPNTEQSSHTQQATHTQPIAHTQQTSITQQLPSTPETSNTSHTQNTQRPPNTRQRNRRGRRRATFHTQQTP

SEQ ID NO: 32024 - protein, 1372 aa, Curetis bulis
MNPNMHQPTFILAHITHHQHQVSQAAVYLNQSHQVNSHLDHLPDYHHLTAYCRRMLCKQLLACDAAPTSSKSSARKKWTKEMNEFILRTYLHLTLMDTDRTAYLLPLYTKFIEKFPHMQTVSRQRVGDQRRAIINKKLLAPQIIDRIYKEVREELEVTYNNNSQQTVEHTQLRNTIGIPETGQRMRWTNELNEAIMKAYYQITNLETNLSAYRKTLHEHFITQFPQLSHVSEQRIADQRRLIVSNKYVSDSRIEAIKLEVKNNLTIANQPLPHSENNENAIINSFDNDILTINLTECNNTDHTDPLGYNSRVIDTEFNEDLTTQSRRERTSEPNNEIDEKFEEIFNIYKNTSPTCRQFIPKQRISKKFINTVNYINTNILPRYVDKNTEFIIFQNTIYCAALTAATVNGFKIRILPVESDNRNALNRTPKWQVRLEKRVQDLRGMIGRLTQYSNGNRNSKLVTKVHKIFKQYNIHSKHEEPNTEISHFLDTLKQKLTVLSTRLKRYKACTLRKDQNKQFYKNQKQFYRNLKSSSSNSNQPETNHTEITVAELDEFHRFWSNIWSNPKEHSIGENWLSSEIEHARNIESMEFQNISVEVFHKIIKKMHNWKAPGSDNIHSYWYKKFTYLHPFLYNFINSFILNPAIIPEYIYEGITIMLPKDNNNRKDPAKYRPITCLQTFYKIITACLSEIIYKYIDTNNILTEQQKGCKRNSRGCTEQLIIDSIILQQVQQKKKDLYTMYIDYKKAFDSVPHSWLLQVLQLYKIHPNIINFLQSAIKKWSTRLRDKNEEETLETAPIVVQRGIFQGDSLSPLWFCLAMNPLSKILLRSDTGYKFKYTTQTPNTTINKIEYKLNHLVYMDDIKLYASTEEELFILTNITEAFSNDICMEFGIEKCKINSVKKGTNYKHFYTLISGENIDPLEEDETYKYLGYNQSKQVEHKEIKGVLKQKFKHRLNSVLRTHLYAKNLIKAINTYAVPVLTYSFGIIKWSKKELKELQRIINTSMTRHRKHHPRSCLQRLTLPRCDGGRGMIDITNLHNTQISSLRAFFHAKSSSTHLHNAISDNDYKYTPLNLRDKTPQKSEIITDRQTKINQWAQKTLHGRHIHDLSQSNVDRAASNEWLSQGYLFPETEGFILAIQDQVIETRNYQRFIMKTSNPVPDICRKCNSASETIQHITGACKMIVQTDYKYRHDQIAKIIHQQLAANYNLIKHPLTPYYKYNPETVLENPAYKVYYDRTILTDRTVHYNRPDITVLDKINNRAFLIDIAVPNTHNLQSTIAEKLTKYAELKDEIIRMWKLQNVTIIPIVLSATGVIPKQLHQSIQTLNLPPKIYIKCQKAVILIKHMPHSKKIFVFKLISLLGFSTYFNHSLT

SEQ ID NO: 32025 - protein, 812 aa, Zonia zonia
MYWLGIFPPKQPIQKARCSRNLRSRNNRTLPKRQLRRLEYARAQKAWTRNPCKYIKTLLSDLTTDTAPEQDRMVPYWKEVMTSGGNPTPYMQNRQNEIWSLLNPITPAEIRKAYPDINTAPGPDGLTARQLRGVPVDILERIFNLMLLCGGVPKHVTISKTTLIPKKNGASEPEDFRPITVGSVLLRTFHKLLANRFMRDVTIDERQKAFVPRDGCAENIFDLDMVLRYHRQNFQSLFLASIDIAKAFDSVSHNAIRQTLITKGVPAPLVSYIMEIYNSSVTKLSCNGWLSEEIHPTRGVKQGDPLSPIIFNWVIDELLKRLPPEIGVDVANRRFSVFAFADDLVLTASSPKGLQTILDATAEFLDSCGLQINATKSFTVAIRSVPHIKKTAVDGSMSFQCMGRPIPAMKRTSEWKYLGIPFTPEGRSDGTEIKRITSALDKLTRAPLKPQQRLFALRTVVLPGIYHLLTLGNITLSKLKKIDAIIRSAVRKWLDLPHDVVNAYIHASAKDGGLAIPSMRWTMPLHRLKRLEGITQKDETKSDFLKQEIGRTQRRLKEKILVDSVSKLERRWATLLHTSSDGKGLKDSRKVPQQHRWITEGTRLLSGKDFINLTKLRINALPTKSRTSRGQISNRACRAGCSQVETINHVLQVCHRTHGVRIRRHNAILAYVKRNMLATCERVEEEPKLRTTEGLRKPDLLAIQGRKATIIDAQVVGEQVDLDKAHERKKQYYLNIEEVVKKEYEVDKVEFGTITLSMRGVWSKASAEDLLHRQFLKKKDIKIVSTRTLIGGLNAFWFFGRSTSTRPRKGVG

SEQ ID NO: 32026 - protein, 1263 aa, Luehdorfia japonica
METRLKSKRLMPLPGGDRRGTPGAGAGCHSMQATGGEEFSGRTLAGLPEDTTSSCRSIQGSSVTPPALDVSQAASAMIPATTKAGKPRVRMSWNSDVNMFIMRTYYQITRLETDLTIYRKILHQKFLEKYPGVNVTEQRVSDQRRVIIRNKLLSDQIIDTIKNDVARELMATDNNENTIINTQNSEAHNKTHSNTEHGNQYNFDNNSIVNELADRTGTQTYTDIYNSLFLGNNTEHHSNTQIIVTPKVNSNNSEDSLSKTLSHNFEANIIKYQGTNPTSRPPLPKIRASRELSHVIKIFNESILPPKLSSIENIVDTHTLIYCTAYTIASHFHGKLKNSPTKRKQIKPAWQIRLENQIEQLRKDMARLLQYKNGNKSKKLEKKVKEIFNKFKQHSLHADLNKSIDDFLDTVKQKLAVKSHRLARYRKAQERKNNNKLFAYNEKQFYRKLKINNNTNTVQNVPAENALEEYWRNVWSQNMEHNQYAEWIDREKVRSDSIEEMTFEDISADEIRSIIGRTHNWKAAGIDNIHNFWVKRLHTLHQILARQITDVIKGNSILPEFLTKGVTYMIPKSDRTHDPSQYRPITCLPTMYKIITSCITNRINRHIEQNNILAEEQKGCRKYHMGCKEQLIIDSSLLKYVQKGRKDLFATYIDYKKAYDSVPHSWLIHILKIYKINPDIVQFLQNTIVSWRTTLKLLTDSANVTTTEIPIKRGIFQGDSLSPLWFCLALNPLSRELIDSKLGFDIKCNRRKLFQLTHLLYMDDLKLYSNKEADIEGLINITLKFSQDIKMEFGLDKCRKLNIKKGKTVPGNYNITEEDKIQAMKSNEFYKYLGYNQARLIEHATTKDKLKQEYTNRIHSLCKMLLNSKNLFKAINTFAVPVLTYSFGVIKWTQTELQALEIKTRTILTQHRYHHPKAAKERITISRKAGGRGLIEITHLHNGQIEGLRKYFDSRKEISQLHKTITEIDKRFTPLNLNCDNTDSVNSEDHNKEKVKRWKEKELHGRHPHELGQVHIDEEASNKWLDVGGLFPETEGFLIAIQDQVISTKNYRKYIIKDNTLSNDLCRKCNSKPETIQHITGACITLANNDYTHRHNQLVNIIHQKLATKHKLIQDSRTPYYKYKPQVVLENSSYKLYYDRTILTDHTIYNNRPDITLVDKDSKRTYLLDIAVPNTNNIQSTIIEKVRKYTELQEEIKKVWKMTNVTIVPIIVSTTGVIPKHLFNSLEILNIPKYTYLTLQKAAILNTCRIVRKFLQLDEAGNN

SEQ ID NO: 32027 - protein, 899 aa, Thyatira batis
MGNTSKKLSQKVKLILQKYQHHSTYDNLNKKVDDHLDTLKQKLAVKSHRLARYKKAAVRKENNKLFTNNEKQFYRKLKGNYTNITNPPTKESLNDFWSQIWSNNAEHNKNTEWIDKEITRSNLVENMAFEDISLEEISVIINRTHNWKAAGHDKIHNFWIKRLNVFHDILAKQITDIIKGNSDLPDFLTKGITFMIPKSDRTEDPSQYRPITCLPTLYKIITACLANRINSHIEHNNLLSEEQKGCRRRHRGCKEQLIIDSTILKYAQKTKKDLYISYIDYKKAFDSVPHSWLLHILNIYRINPQIISFLEKTMRNWKTTLNIRTPTTNISTNEIAIKRGIFQGDSLSPLWFCLALNPLSRELIDSKIGFNIKSNRQTIFQLTHLLYMDDLKLYANKETEINKLLDITKTFSDDIKMDFGLDKCRKLNIKRGNIVAGTYTVNEEETIQAMENNELYKYLGYNQSRSLDHTQIRHKIKQEYFNRINYLCKMQLASRYLFKAINTYAIPILTYSFGIIKWSNTELQSIQIKTRTTLTQHRYHHPKSAKERVNIPRKEGGRGLIDISQLHKRQINNLKQFFKQKKLDSTLHKTITSIDKNYTPLNLSDEQPIETVDKVQLVEEQNRQWKGKELHGRHPHDLNQPHVDKEASNRWLHSGDLFPETEGFLIAIQDQVINTKNYRKYILKDTTLQNDLCRKCNNKPETIQHITGACVTLTQNDYTHRHNQLVNIAHQKLARKYKLLRQSEPHTPYYKYSPQAVMETSSYKLYYDRTIMTDHTIYNNRPDITLVDKANKHTYIIDIAVPNTNNIQSTIAEKIRKYTELQEEIKRVWKMNHVTIVPIILSTTGVIPKLLFKSLETLDLPKYTYVTLQKAAILNTCRIVRKFLQLDSTYQPLSFESQS

SEQ ID NO: 32028 - protein, 1182 aa, Thyatira batis
MRPATTKAGKPSVRMKWNQDINIFIMRTYFQITKLETDLTQYRPILHRRFMEAFPNVDVSEQRLSDQRRVIVRNRLLSHEKIEQIRNEIRQDIQSIESNNSTFDLNIPNSNINSRNRTRSEDQSIITTLDTNYSLTPENNIHTNSLNTSQHNNCTQQTHNHHENTELTQKLTEELETNLTTYNDMDPTTRPLLPKIKTSRDLTNIITLFNSSILPSKLSLSNNITQTHTLIYCTALTIITYFNIKIGDRPYRGSTKGKPEWQVRLERDIEQLRQDTARLTQFKMGNTSKKLSQKVKLILQKYQHHSTYDNLNKKVDDHLDTLKQKLAVKSHRLARYKKAAVRKENNKLFTNNEKQFYRKLKGNYTNITNPPTKESLNDFWSQIWSNNAEHNKNTEWIDKEITRSNLVENMAFEDISLEEISVIINRTHNWKAAGHDKIHNFWIKRLNVFHDILAKQITDIIKGNSDLPDFLTKGITFMIPKSDRTEDPSQYRPITCLPTLYKIITACLANRINSHIEHNNLLSEEQKGCRRRHRGCKEQLIIDSTILKYAQKTKKDLYISYIDYKKAFDSVPHSWLLHILNIYRINPQIISFLEKTMRNWKTTLNIRTPTTNISTNEIAIKRGIFQGDSLSPLWFCLALNPLSRELIDSKLGFNIKSNRQTIFQLTHLLYMDDLKLYANKETEINKLLDITKTFSDDIKMDFGLDKCRKLNIKRGNIVAGTYTVNEEETIQAMENNELYKYLGYNQSRSLDHTQIRHKIKQEYFNRINYLCKMQLASRYLFKAINTYAIPILTYSFGIIKWSNTELQSIQIKTRTTLTQHRYHHPKSAKERVNIPRKEGGRGLIDISQLHKRQINNLKQFFKQKKLDSTLHKTITSIDKNYTPLNLSDEQPIETVDKVQLVEEQNRQWKGKELHGRHPHDLNQPHVDKEASNRWLHSGDLFPETEGFLIAIQDQVINTKNYRKYILKDTTLQNDLCRKCNNKPETIQHITGACVTLTQNDYTHRHNQLVNIVHQKLARKYKLLRQSEPHTPYYKYSPQAVMETSSYKLYYDRTIMTDHTIYNNRPDITLVDKANKHTYIIDIAVPNTNNIQSTIAEKIRKYTELQEEIKRVWKMNHVTIVPIILSTTGVIPKLLFKRLETLDLPKYTYVTLQKAAILNTCRIVRKFLQLDSTYQPLSFESQS

SEQ ID NO: 32029 - protein, 1358 aa, Thyatira batis
MSSRRYNLRPLPGGRRGTPGAGAGCLSMQTTGDEELSRRALVDQDTTAERQQLNRRIAAVDATAEHQELTRRASDENATADQEHRQIYYNRSRPVPPRSLEPRRGRYLSTRSKGKHQTIPEDDWHGDDRERSQSQEVVNSLSNQTFTGASEYNRPSQSVCNTIEETNTPPATDVSQAASAMRPATTKAGKPSVRMKWNQDINIFIMRTYFQITKLETDLTQYRPILHRRFMEAFPNVDVSEQRLSDQRRVIVRNRLLSHEKIEQIRNEIRQDIQSIESNNSTFDLNIPNSRNRTRSEDQSIITTLDTNYSLTPENNIHTNSLNTSQHNNCTQQTHNHHENTELTQKLTEELETNLTTYNDMDPTTRPLLPKIKTSRDLTNIITLFNSSILPSKLSLSNNITQTHTLIYCTALTIITYFNIKIGDRPYRGSTKGKPEWQVRLERDIEQLRQDTARLTQFKMGNTSKKLSKKVKLILQKYQHHSTYDNLNKKVDDHLDTLKQKLAVKSHRLARYKKAAVRKENNKLFTNNEKQFYRKLKGNYTNITNPPTKESLNDFWSQIWSNNAEHNKNTEWIDKEITRSNLVENMAFEDISLEEISVIINRTHNWKAAGHDKIHNFWIKRLNVFHDILAKQITDIIKGNSELPDFLTKGITFMIPKSDRTKDPSQYRPITCLPTLYKIITACLANRINSHIEHNNLLSEEQKGCRRRHRGCKEQLIIDSTILKYAQKTKKDLYISYIDYKKAFDSVPHSWLLHILNIYRINPQIISFLEKTMRNWKTTLNIRTPTTNISTNEIAIKRGIFQGDSLSPLWFCLALNPLSRELIDSKIGFNIKSNRQTIFQLTHLLYMDDLKLYANKETEINKLLDITKTFSDDIKMDFGLDKCRKLNIKRGNIVAGTYTVNEEETIQAMENNELYKYLGYNQSRSLDHTQIRHKIKQEYFNRINYLCKMQLASRYLFKAINTYAIPILTYSFGIIKWSNTELQSIQIKTRTTLTQHRYHHPKSAKERVNIPRKEGGRGLIDISQLHKRQINNLKQFFKQKKLDSTLHKTITSIDKNYTPLNLSDEQPIETVDKVQLVEEQNRQWKGKELHGRHPHDLNQPHVDKEASNRWLHSGDLFPETEGFLIAIQDQVINTKNYRKYILKDTTLQNDLCRKCNNKPETIQHITGACVTLTQNDYTHRHNQLVNIVHQKLARKYKLLRQSEPHTPYYKYSPQAVMETSSYKLYYDRTIMTDHTIYNNRPDITLVDKANKHTYIIDIAVPNTNNIQSTIAEKIRKYTELQEEIKRVWKMNHVTIVPIILSTTGVIPKLLFKSLETLDLPKYTYVTLQKAAILNTCRIVRKFLQLDSTYQPLSFESQS

SEQ ID NO: 32030 - protein, 1349 aa, Thyatira batis
MAIIHKYYRHNIFIWYIFIPYYDTFARVVIIIIITTAELQQLNRRIAAVDATAEHQELTRRASDENATADQEHRQIYYNRSRPVPPRSLEPRRGRYLSTRSKGKHQTIPEDDWHGDDRERSQSQEVVNSLSNQTFTGASEYNRPSQSVCNTIEETDTPPATDVSQAASAMRPATTKAGKPSVRMKWNQDINIFIMRTYFQITKLETDLTQYRPILHRRFMEAFPNVDVSEQRLSDQRRVIVRNRLLSHEKIEQIRNEIRQDIQSIESNNSTFDLNIPNSNINSRNRTRSEDQSIITTLDTNYSLTPENNIHTNSLNTSQHNNCTQQTHNHHENTELTQKLTEELETNLTTYNDMDPTTRPLLPKIKTSRDLTNIITLFNSSILPSKLSLSNNITQTHTLIYCTALTIITYFNIKIGDRPYRGSTKGKPEWQVRLERDIEQLRQDTARLTQFKMGNTSKKLSQKVKLILQKYQHHSTYDNLNKKVDDHLDTLKQKLAVKSHRLARYKKAAVRKENNKLFTNNEKQFYRKLKGNYTNITNPPTKESLNDFWSQIWSNNAEHNKNTEWIDKEITRSNLVENMAFEDISLEEISVIINRTHNWKAAGHDKIHNFWIKRLNVFHDILAKQITDIIKGNSDLPDFLTKGITFMIPKSNRTEDPSQYRPITCLPTLYKIITACLANRINSHIEHNNLLSEEQKGCRRRHRGCKEQLIIDSTILKYAQKTKKDLYISYIDYKKAFDSVPHSWLLHILNIYRINPQIISFLEKTMRNWKTTLNIRTPTTNISTNEIAIKRGIFQGDSLSPLWFCLALNPLSRELIDSKLGFNIKSNRQTIFQLTHLLYMDDLKLYANKETEINKLLDITKTFSDDIKMDFGLDKCRKLNIKRGNIVAGTYTVNEEETIQAMENNELYKYLGYNQSRSLDHTQIRHKIKQEYFNRINYLCKMQLASRYLFKALNTYAIPILTYSFGIIKWSNTELQSIQIKTRTTLTQHRYHHPKSAKERVNIPRKEGGRGLIDISQLHKRQINNLKQFFKQKKLDSTLHKTITSIDKNYTPLNLSDEQPIETVDKVQLVEEQNRQWKGKELHGRHPHDLNQPHVDKEASNRWLHSGDLFPETEGFLIAIQDQVINTKNYRKYILKDTTLQNDLCRKCNNKPETIQHITGACVTLTQNDYTHRHNQLVNIVHQKLARKYKLLRQSEPHTPYYKYSPQAVMETSSYKLYYDRTIMTDHTIYNNRPDITLVDKANKHTYIIDIAVPNTNNIQSTIAEKIRKYTELQEEIKRVWKMNHVTIVPIILSTTGVIPKLLFKSLETLDLPKYTYVTLQKAAILNTCRIVRKFLQLDSTYQPLNFES

SEQ ID NO: 32031 - protein, 1362 aa, Thyatira batis
MSSRRYNLRPLPGGRRGTPGAGAGCLSMQTTGDEELSRRALVDQDTTAERQQLNRRIAAVDATAEHQELTRRASDENATADQEHRQIYYNRSRPVPSRSLEPRRGRYLSTRSKGKHQTIPEDDWHGDDRERSQSQEVVNSLSNQTFTGASEYNRPSQSVCNTIEETNTPPATDVSQAASAIRPATTKAGKPSVRMKWNQDINIFIMRTYFQITKLETDLTQYRPILHRRFMEAFPNVDVSEQRLSDQRRVIVRNRLLSHEKIEQIRNEIRQDIQSIESNNSTFDLNIPNSNINSRNRTRSEDQSIITTLDTNYSLTPENNIHTNSLNTSQHKNCTQQTHNHHENTELTQKLTEELETNLTTYNDMDPTTRPLLPKIKTSRDLTNIITLFNSSILPSKLSLSNNITQTHTLIYCTALTIITYFNIKIGDRPYRGSTKGKPEWQVRLERDIEQLRQDTARLTQFKMGNTSKKLSQQVKLILQKYQHHSTYDNLNKKVDDHLDTLKQKLAVKSHRLARYKKAAVRKENNKLFTNNEKQFYRKLKRNYTNITNPPTKESLNDFWSQIWSNNAEHNKNTEWIDKEITRSNLVENMAFEDISLEEISVIINRTHNWKAAGHDKIHNFWIKRLNVFHDILAKQITDIIKGNSDLPDFLTKGITFMIPKSDRTEDPSQYRPITCLPTLYKIITACLANRINSHIEHNNLLSEEQKGCRRRHRGCKEQLIIDSTILKYAQKTKKDLYISYIDYKKAFDSVPHSWLLHILNIYRINPQIISFLEKTMRNWKTTLNIRTPTTNISTNEIAIKRGIFQGDSLSPLWFCLALNPLSRELIDSKIGFNIKSNRQTIFPLTHLLYMDDLKLYANKETEINKLLDITKTFSDDIKMDFGLDKCRKLNIKRGNIVAGTYTVNEEETIQAMENNELYKYLGYNQSRSLDHTQIRHKIKQEYFNRINYLCKMQLASRYLFKAINTYAIPILTYSFGIIKWSNTELQSIQIKTRTTLTQHRYHHPKSAKERVNIPRKEGGRGLIDISQLHKRQINNLKQFFKQKKLDSTLHKTITSIDKNYTPLNLSDEQPIETVDKVQLVEEQNRQWKGKELHGRHPHDLNQPHVDKEASNRWLHFGDLFPETEGFLIAIQDQVINTKNYRKYILKDTTLQNDLCRKCNNKPETIQHITGACVTLTQNDYTHRHNQLVNIVHQKFARKYKLVRQSEPHTPYYKYSPQAVMETSSYKLYYDRTIMTDHTIYNNRPDITLVDKANKHTYIIDIAVPNTNNIQSTIAEKIRKYTELQEEIKRVWKMNHVTIVPIILSTTGVIPKLLFKSLETLDLPKYTYVTLQKAAILNTCRIVRKFLQLDSTYQPLSFESQS

SEQ ID NO: 32032 - protein, 1362 aa, Thyatira batis
MSSRRYNLRPLPGGRRGTPGAGAGCISMQTTGDEELSRRALVDQDTTAERQQLNRRIAAVDATAEHQELTRRVSDENATADQEYRQIYYNRSRPVPPRSLEPRRGRYLSTRSKGKHQTIPEDDWHGDDRERSQSQEVVNSLSNQTFTGASEYNRPSQSVCNTIEETDTPPAMDVSQAASAMRPATTKAGKPSVRMKWNQDINIFIMRTYFQITKLETDLTQYRPILHRRFMEAFPNVDVSEQRLSDQRRVIVRNRLLSHEKIEQIRNEIRQDIQSIESNNSTFDLNIPNSNINSRNRTRSEDQSVITTLDTNYSLTPENNIHTNSLNTSQHNNCTQQTHNHYENTELIQKLTEELETNLTTYNDMDPTTRPLLPKIKTSRDLTNIITLFNSSILPSKLSLSNNITQTHTLIYCTALTIITYFNIKIGDRPYRGSTKGKPEWQVRLERDIEQLRQDTARLTQFKMGNTSKKLSQKVKLILQKYQHHSTYDNLNKKVDDHLDTLKQKLAVKSHRLARYKKAAVRKENNKLFTNNEKQFYRKLKGNYTNITNPPTKESLNDFWSQIWSNNAEHNKNTEWIDKEITRSNLVENMAFEDISLEEISVIINRTHNWKAAGHDKIHNFWIKRLNVFHDILAKQITDIIKGNSDLPDFLTKGITFMIPKSDRTEDPSQYRPITCLPTLYKIITACLANRINSHIEHNNLLSEEQKGCRRRHRGCKEQLIIDSTILRYAQKTKKDLYISYIDYKKAFDSVPHSWLLHILNIYRINPQIISFLEKTMRNWKTTLNIRTPTTNISTNEIAIKRGIFQGDSLSPLWFCLALNPLSRELIDSKLGFNIKSNRQTIFQLTHLLYMDDLKLYANKETEINKLLDITKTFSDDIKMDFGLDKCRKLNIKKGNIVAGTYTVSEEETIQAMENNELYKYLGYNQSRSLDHTQIRHKIKQEYFNRINYLCKMQLASRYLFKAINTYAIPILTYSFGIIKWSNTELQSIQIKTRTTLTQHRYHHPKSAKERVNIPRKEGGRGLIDISQLHKRQINNLKQFFKQKKLDSTLHKTITSIDKNYTPLNLSDEQPIETVDKVQLVEEQNRQWKGKELHGRHPHDLNQPHVDKEASNRWLHSGDLFPETEGFLIAIQDQVINTKNYRKYILKDTTLQNDLCRKCNNKPETIQHITGACVTLTQNDYTHRHNQLVNIVHQKLARKYKLLRQSEPHTPYYKYSPQAVMETSSYKLYYDRTIMTDHTIYNNRPDITLVDKANKHTYIIDIAVPNTNNIQSTIAEKIRKYTELQEEIKRVWKMNHVTIVPIILSTTGVIPKLLFKSIETLDLPKYTYVTLQKAAILNTCRIVRKFLQLDSTYQPLSSESQS

SEQ ID NO: 32033 - protein, 804 aa, Phalera bucephala
MTHFWSNIWSNNAEHNPEAEWINREITRTSIIDEMKFEEIKLEELKRIINKTKNWKAAGLDGIHNFWIKRLHAVHETLTKQIDELIKGKGNVPEFLTKGITYMLPKSNQTQDPSQYRPITCLPTLYKIITSCIANRINAHIEQFSILAEEQKGCRRHHMGCKEQLTIDSAILKSVQKSRKNLFVAYIDYKKAFDSIPHSWLLQVLKIYKINPVIINFIQTVMTSWRTILHIRTDSKNFTSNDIAIKRGIFQGDSLSPLWFCLALNPLSRALIDSKLGFNIKNNRQTLFQLTHLLYMDDLKLYANRSTDLDNLLSITTKFSHDIKMDFGLDKCRKLNIKKGNMIEGDFMITETECIQAMNNEELYKYLGYNQARLIDHSNIKKKLKQEYFNRLHNLCKMQLISKNLFKSINAYAIPVLTYSFGLIKWSKTELNSLETKTRTILTQHRYHHPKSAKERINIPRLEGGRGFIEITQLYHGQIANLKQFFIRKKENSLLHKAIVEIDKQFTPLNLCDEVVQPIDKIEHHRNRHRIWRQKELHGRHPNDLDQSHINKEASNKWLDLGELFPETEGYLISIQDQVINTKNYRKYILKDPTLRNDLCRKCNKKPETIQHITGACSTLTQNDYMHRHNQLANIIHQKLATKHKLTNKPHSPYYKYSPPPVLENHSVKLYYDRTIITDHTVYNNRPDITFVDKENKHTYLIDIAVPNTNNLQTTIAEKIRKYTELQEEIKRVWKMNTVTIVSIIISTTGIIPKQLFNGLQLLKLSPYTYLTVQKAAILNTCRIVRKFLQLDSDSQFTTAEQPT

SEQ ID NO: 32034 - protein, 1263 aa, Phalera bucephala
METRSNRKRLMPLPGGDRRGTPGAGAGRSSMQATGGESITGRSLAGIPEEATSSSSNPTIAQEFQTQPAADASQAASAMRPATTKAGKPRVRMKWDKDVNIFIIRTYLQITNLETDLTEYRQKLHQEFIQQYPNANVTEQRLSDQRRAIIRNRFLSEETLQQIRDEVQYSIRRSNKFDNTSQVIPSPLIGNNVPRHCDYINSQEDTGILTQDISNIQSFENIPQYNTQTQPITQTNLQLEESQTHLDDTDLKYILTENLETYLTKYTGTNPADRPSLPKIRSSRTLTKIINSFNNTIIPKKITNLETITDTHTLIYCSALTIVTHLKIKIRYKCNKIIKTKPAWQIRLEKDIEQLRKDIGRLTQHKNGNTSKKLSAKIKQILIKSNKHSSYEDPNRRIDDHLDTLKQKLAVKSHRLARYIKAENRKRHNKLFFHNQKGFYRQLKDKHTPITALPDEEAMTHFWSNIWSNNAEHNPEAEWINREITRTSTIDEMKFEEIKLEELKRIINKTKNWKAAGLDGKHNFWIKRLHAVHETLTKQINELIKGKGNVPEFLTKGITYMLPKSNQTQDPSQYRPITCLPTLYKIITSCIANRINAHIEQFSILAEEQKGCRRHHMGCKEQLTIDSAILKSVQKSRKNLFVAYIDYKKAFDSIPHSWLLQVLKIYKINPVIINFIQTVMTSWRTTLHIRTDSKNFTSNDIAIKRGIFQGDSLSPLWFCLALNPLSRELIDSKLGFNIKNNRQTLFQLTHLLYMDDLKLYANARSTDLDNLLSITTKFSHDIKMDFGLDKCRKLNIKKGKMIEGDFMITETECIQAMNNEELYKYLGYNQARLIDHSNIKKKLKEEYFNRLHNLCKMQLISKNLFKSINAYAIPVLTYSFGLIKWSKTELNSLETKTRTILTQHRYHHPKSAKERINIPRLEGGRGLIEITQLYHGQIANLKQFFIRKKENSLLHKAIVEIDKQFTPLNLCDEVVQPIDKIEHHRNRHRIWRQKELHGRHPHDLDQSHINKEASNKWLDLGELFPETEGFLISIQDQVINTKNYRKYILKDPTLRNDLCRKCNKKPETIQHITGACSTLTQNDYMHRHNQLANIIHQKLATKHKLTNKPQSPYYKYTPPPVLENHSVKLYYDRTIITDHTVYNNRPDITFVDKENKHTYLIDIAVPNTNNLQTTIAEKIRKYTELQEEIKRVWKMNTVTIVPIIVSTTGIIPKQLFNGLQLLKLSPYTYLTLQKAAILNTCRIVRKFLQLDSDSQFTTAEQPT

SEQ ID NO: 32035 - protein, 781 aa, Phalera bucephala
MTHFWSNIWSNNAEHNPEAEWINREITRTSTIDEMKFEEIKLEELKRIINKTKNWKAAGLHGIHNFWIKRLHAVHETLTKQINELIKGEDNVPEFLTKGITYMLPKSNQTQDPSQYRPITCLPTLYKIMTSCIANRINAHIEQFSILAEEQKGCRRHHMGCNEQLTIDSAILKSVQKSRKNLFVAYIDYKKAFDSIPHSWLLQVLKIYKINPVIINFIQTVMTSWRTTLHIRTDSKNFTSNDIAIKRGIFQGDSLSNLWFCLALNPLSRELIDSKLGFNIKNNRQTLFQQTHLLYMDDLKLYANRSTDLDNLLSITTKFSHDIKMDFGLDKCRKLNIKKGKMIEGDFMITETECIQAMNNEELYKYLGYNQARLIDHSNIKKKLKQEYFNRLHNLCKMQLISKNLFKSINAYAIPVLTYSFGLIKWSKTELNSLETKTRTILTQHRYHHPKSAKERINIPRLEGGRGLIEITQLYHGQIANLKQFFIRKKENSLLHKAIVEIDQQFTPLNLCDEVIQPIDKIEHHRNRHRIWRQKELHGRHPHDLDQSHINKEASNKWLDLGELFPETEGFLISIQDQVINTKNYRKYILKDPTLRNDLCRKCNKKPETIQHITGACSTLTQNDYMHRHNQLANIIHQKLATKHKLTNKPHSPYYKYSPPPVLENHSVKLYYDRTIITDHTVYNNRSDITFVDKENKHTYLIDIAVPNTNNLQTTIAEKIRKYTELQEEIKRVWKMNTVTIVPIIVSTTGIIPKQLFNGLQLLNLSPYTYLTLQKAAILNT

SEQ ID NO: 32036 - protein, 938 aa, Gonioctena quinquepunctata
MWKEIQEWKRFEYSYKRMHALMIKARPQMCDGSLTWNEGSFSKNESFSDSLNSRLSFQKLISHIIRRIPKSARVSAAEALCRAIDNCVEYNSLEAWENLFFFAYKSFYLPTSNKNRKESQMSIIKRNIRNNNIPQYISKEIQSLPPTTNLAKCVINKVSDGDLISAVRIFSSSDTIASFDSHTLSELRLKHPTDSEVEYTGSENFIPLQVNEIEVSKAVKSFRTGSSGGLDSLRPSHLQDLLSKSSGSMGEKLLSSLTSFCNFLLTGKVIQDVIPILYGASLVALKKKDGGIRPIAVGLILRWLVAKLACSKIKETLGELFRPIQFGFGTPGGCEAVAHAARRFLNQHPDPASTVFLKIYLQNAFNMIHRNILLERVEDKIPNLYPFISQCYKKHTFLNFGNNTILSERGVQQGDPLGPALFCLCIDNLTRSIKADFNCWYLDDGSIGGKSDVILEQFKKIISTSEKIGLKLNFEKCELYFLDDLKDDIPKMFYSFAPGMKIMNKTNWTLLGAPMSEESLAQSLNQKTKSLNLMASRMDSIPKHIGYFLLKNSLAIPKLIYTLRCCPTWRCQNELDLFDSTLRMILEQITNNNFSLSTWLQATLTKESGAWLNALPVAFLGTLLDDESFRISVGLRLGCSICVSHKCRCGFIVNEKGTHGLSCRFSSGRSSRHSTVNDLIKRALSNADIPAVLEPLGIIRDDGKRPDGMSLIPWSHGKPLVWDFTCVDTVAASHIDSTSRNAGGAADSAEKSKLKKYSTLKDKYIFYPVAIETFGSFGSYATELINHIGQKLISKTDDRRARTFLIQHISIAIQRGNATSILGSIPATQHLDDIFIRPQRINMSSSIHKYIIRSQIPGKYNLDSTTSKKITRSTISLSNSISSSLQSSSLLRRSNDRENHCIRDCPFEDSNSGERISLVMISSNHLCLEAPKLLVLMV

SEQ ID NO: 32037 - protein, 993 aa, Gonioctena quinquepunctata
MMSDVRAAIDSEALEFQCGICGRRFKNGRGLNIHTKRMHRSYDKGLASQMCDGSLTWNEGSFSKNESFSDSLNSRLSFQKLNSHIIRRIPKSARVSAAEALCRAIDNCVEYNSLEAWENLFFFAYKSFYLPTSNKNRKESLTSIIKSNIRNNDIPQYISKDIQSLPPTTNLAKCVINKVSDGDLISAVRILSSSDTIASFDSHTLSELRLKHPTDSEVEYTGVKTLFHYKSMKLKFQKAKTFEFRTRSSGGLDSLRPSHLQDLLSKSSGSMGEKLLSSLTSFCNFLLTGKVIQDVIPILYGASLVALKKKDGGIRPIAVGLIFRRIVAKLACSKIKETLGELFRPIQFGFGTPGGCEAVAHAARRFLNQHPDPASTVFLKIDFQNAFNMIHRNILLERVEDKIPNLYPFISQCYKKHTFLNFGNNTILSERGVQQGDPLGPALFCLCIDNLTKSIKADFNCWYLDDGSIGGKSDVILEQFKKIISTSEKIGLKLNFEKCELYFLDDLKDDIPGKFYSFAPGMKIMNKTNWTLLGAPMSEESLAQSLNQKTQSLNLMASRMDSIPKHIGYFLLKNCLAIPKLIYTLRCCPTWRCQNELDLFDSTLRMILEQITNNNFSLSTWLQAILPVNKGGLAIRQASSLALPAFLSSLNSIQHLVDQIVPDYFSSVSDVYYIECESVWCSKTGTSAPDNKISQKSWDLPLIELSSKQLLDSAVNSPFEKARLKAVSTKESGAWLNALPVAFLGTLLDDESFRISVGLRLGCSICVSHKCRCGFIVNEKGTHGLSCRFSSGRSSRHSTVNDLIKRALLTADIPAVLEPLGIIRDDGKRPDGMSLIPWSHGKPLVWDFTCVDTVAASHIDSTSRNAGGAADSAENSKLKKDSTLKDQYIFYPVAIETFGSFGSYATELINHIGQKLINKTDDRRARTFLIQHISIAIQRGNATSILGSIPATQRLDDIFIRPQRINMSSSIHKYIIRSQIPEKLIWIQPLPKK

SEQ ID NO: 32038 - protein, 1032 aa, Gonioctena quinquepunctata
MMSDVRAAIDSEALEFQCGICGRRFKNGRGLNIHTKRMHRSYDKGSALQMCDGSLTWNEGSFSKNESFSESLNSRLSFQKLNSHIIRRIPKSARVSAAEALCRAIDNCVEYNPLEAWENLFFFAYKSFYLPTSNKNRKESLTSIITRNIRNNNIPQYISKDIQSIPPTTNLAKCVINKVSDGDLISAVRILSSSDTIASFDSHTLSELRLKHPTDSEVEYTGSENFIPLQVNEIEVSKAVKSFRTGSSGGLDSLRPSHLQDLLSKSSGSMGEKLLSSFTSFCNFLLTGKVIQDVIPILYGASLLALKKKDGGIRPIAVGLIFRRLVTKPACSKIKETLGELFRPIQFGFETPGRCEAVAHAARRFLNQHPDPASTVFLKIDFQNAFNMIHRNILSERVEDNIPNLYPFISQCYKKHTFLNFGNNTILSERGVQQGDPLGPALFCLCIDNSTKSIKADFNCWYLADGSIGGKSDAISEQFKKKISTSEKKGLELNFEKCELYFLDDPKDDIPKKFYSFSPGMKFMNKTNWTLLGAPISEESLAQSLNQKTKSLNLMASRMDSIPKHIGYFLLKNCLAIPKLIYTLICCPTWRCQNELDLFDSTLRMILEQITNNNFSLSTWLQATLPVNKVGLGIRQASSLALPAFLSSLNSIQHLVDQIVPDYFSSVSDVHFIECESVWCSKTGTSAPDNKISQKSWDLPLIELSSKQLLDSTVNSPSEKSRLKAVSTKESGTWLNAVPVAFLGTLLDDESFRISVGLRLGCSICVSHKCRCGFIVNEKGTHGLSCRFSSGRSSRHSTVNDLIKRALSTADIPAVLEPLGIIRDDGKRPDGMSLIPWSHGKPLVWDITCVDTVAASHIDSTSRNAGGAADSAEKSKLKKYSTLKHQYIFYPVAIETFGSFGSYATELIIHIGQKLINKTDDRRARTFLIQHISIAIQRGNATSILGSIPATQRLDDIFIRPQRINMSSSIHKYIIRSQIPGKYNLDSTTSKKITRSTISLSNSISSSLQSSSLLRRSNDRENHCIRDCPFEQ

SEQ ID NO: 32039 - protein, 771 aa, Gonioctena quinquepunctata
MGEKLLSSLTSFCNFLLTGKVIQDVIPILYGASLVALKKKDGGIRPIAVGLIFRRLVAKLACSKIKETLGELFRPIQFGFGTPGGCEAVAHAARRFLNQHPDPDFQNAFNMIHRNILLERVEDKIPNLYPFISQYYKKHTFLNFGNNTILSERGVQQGDPLGPALFCLCIDNLTKSIKADFNCWYLDYGSIGGKSDVILEQFKKIISTSEKIGLKLNFEKCELYFLDDLKYDIPEKFYSFAPGMKLMNKINWTLLGAPMSEESLAQSLNQKTESLNLMASRMDSIPKHIGYFLLKNCLAIPKLIYTLRCCPTWRCQNELDLFDSTLRMILEQITNNNFSLSTWLQATLPVNKGGLGIRQASSLALPAFLASLKSIQHLGDQILPDYFSSVPDVYYIECESVWCSETGTSAPDNKISQKSWDLPLIELSSKQLLDSAVNSPLEKARLKAVSTKESGAWLNALPVAFLGTLLDDESFRISVGLRLGCSICVSHKCRCGFIVNEKGTHGLSCRFSSGRSSRHSTVNDLIKRALSTADIPAVLEPLGIIRDDGKRPDGMSLIPWSHGKPLVWDFTCVDTVAASHIDSTSRNAGGAADSAEKSKLKKYSTLKDQYFFYPVAIETFGSFGSYANELINHIGQKLINKTDDRRARTFLIQHISIAIQRGNATSILASIPATQRLDDIFIRPQKINMSRSIHKYITRSQIPEKYNLDSTTSKTITRSTISLSNSISSSLQSSSLLRRSNDRENHCIRDYSFEDSSSSERISQYGVALYE

SEQ ID NO: 32040 - protein, 977 aa, Metaphire vulgaris
MEPGPSQLSQKRSGLCAVCRTVRRLHCGDGKVYLHGPHSNPCPGSNQPPLHSGSQPTAPVSNVGSNQRDLSAPTSSSLEATANSNVGDDHPGCFVSHPTITSAIAKHVPKSARTTVCQLLIDIINKILANPSIIDHWRDLICFAPIILKQMARGGKRHNQASAFKKRTQNFYAELHENIEILSDASQTASSKTATRKSRDQMLAASVSSKLEDGNIRAAVRILMSDEEPVTPDPQTYQELLGKHPSPPEDRVHMPPASDCAPLRVSEEDVRARIRSFPAGSSGDPDGLRPQIVAELITSPEAGSRLVSAITGLINLLLSGTCPDQVRPILFGGTLLALRKKAGGLRPIAIGYFWRRLASKCAANFALSRVSDYLAPLQVGVGCPGGCEAAVHATRRFLDAMPDDNVIVKLDFSNAFNSVQRDRMLTALTNILPELSKYGLLSYGSPSLLKFRLSSQMGPQQGDPLGPLLFCLPRQPILRKLTAELILGYLDDVTLGGDANSVASDVAVIERECKELGLSLNHRKCEIISKGPIPATNTSLDIFQRIEPQDAILLGAPLSITQAFGSLMSHRSNEPNMALNRLTLIAKQDALILLRMSLTHSKLLHLLRCTPCTGHPLLENFDDAMREGLNQILNLRLSDSQWVQATLPIRDGGLGIRRVSALAPSAFLASAASTQDLQSSILLKASLPTDPRETEIIAQWREMSQMDNPGSGPLHKQSTWDRPLILREYNHLSQSDQRQYHQARLRAVSSEHARDWLYGLPIASCGLRMDDEAVRIVVGLRLGANICERHICPCGEQVLEVGSHGLSCSLGPGRVPRHTMINDVIYRALLRAGIPSVKEPPDLSRSDGRRPDGLTLIPWHAGRSLIWDVTVADTVAATHLPITSLLAGAAAEAAAVRKNTKYADLTTDYNFLPLAFESFGPISLDAQIFIRQLGRVFQSLPETKGKEAFFFSVCPWPYSASTPYRFEELFRGRPRRT

SEQ ID NO: 32041 - protein, 883 aa, Metaphire vulgaris
MYIYKHVPKSARTTVCQLLIDIINKILANPSIIDHWRDLICFAPIILKQTARGGKRHNQASAFKKRTQNFYAELHENIEILSDASQTLSSKAATRKSRDQMLAASVSSKLEDGNIRAAVRILMSDEEPVTPDPQTYQELLGKHPSPPEDRVHMPPASDCTPLRVSEEDVRARIRSFPAGSSGGPDGLRPQIVAELITCPEAGGRLVSAITGLINLLLSGTCPDQVRPILFDGTLLALRKKAGGLRPIAIGYFWRRLASKCAANFALSRVSDYLAPLQVGVGCPGGCEAAVHATRRFLDAMPDDNVIVKLDFSNAFNSVQRDRMLTALTNILPELSKYGLLSYGSPSLLKFGKFRLSSQMGPQQGDPLGPLLFCLPLQPILRKLTAALILGYLDDVTLGGDADSVASDVSVIERECKELGLSLNHRKCEIISKGPIPATDTSLDSFQRIEPQDAILLGAPLSITQAFGSLMSHRSNELNLALNRLTLIAKQDALILLRMSLTHSKLLHLLRCTPCTGHPLLENFDDAMREGLNQILNLRLSDSQWVQATLPIRDGGLGIRRVSALAPSAFLASAASTRDLQSSILLKASLPTDPRETEIIAQWREMSQMDNPGSGPLHKQSTWDRPLILREFNHLLQSDQRQYHQARLRAVSVEHAGDWLYALPIASCGLRMDDEAVRIVVGLRLGANTCERHVCQCGEQVLEVGSHGLSCSLGPGRVPRHTMINDVVYWALLRAGIPSVKEPPDLSRSDGRRPDGLTLIPWHAGRSLIWDVTVADTVAATHLPITSLLAGASAEAAAVRKNTKYADLTTDYNFLPLAFESFGPISLDAQIFIRQLGRRISESIGDKREGSFLFQRLSMAIQRFNAISFRGTFSVADLEEPDES

SEQ ID NO: 32042 - protein, 984 aa, Metaphire vulgaris
MEPGPSQLSQKRSGLCAVCRTVRRLHCGDGKVHLHGPHSNPCPGSNQPPLHSGSQPIALDSNVGSNQHDLSAPTSSSLEATANSNVGDDHPECFVFHPTITSAISKHVPKSARTTVCRLLIDIINKILANPSIIDHWRDLICFAPIILKQTARGGKRHNQASAFKKRTQNFYAELHENIEILSDASQTLSSKAATRKSRDQMLAASVSSKLEDGNIRAAVRILMSDEEPVTPDPQTYQELLGKHPSPPEDRVHMPPASDCTPLRVSEEDVRARIRSFPAGSSGGPDGLRPQIVAELITCPEAGSRLVSAITGLINLLLSGTCPDQVRPILFGGTLLALRKKAGGLRPIAIGYFWRRLASKCAANFALSRVSDYLAPLQVGVGCPGGCEAAVHATRRFLDAMPDDNVIVKLDFSHAFNSVQRDRMLTALTNILPELSKYGLLSYGSPSLLKFGKFRLSSQMGPQQGDPLGPLLFCLPLQPILRKLTAALILGYLDDVTLGGDADSVAGDVSVIERECKELGLSLNHRKCEIISKGPIPATDTSLDSFQRIEPQDAILLGAPLSITQAFGSLMSHRSNELNLALNRLTLIAKQDALILLRMSLTHSKLLHLLRCTPCTGHPLLENFDDAMREGLNQILNLRLSDSQWVQATLPIRDGGLGIRRVSALAPSAFLASAASTRDLQSSILLKASLPTDPRETEIIAQWREMSQMDNPGPGPLHKQSTWDRPLILREFNHLLQSDQRQYHQARLRAVSAEHAGDWLYALPIASCGLRMDDEAVRIVVGLRLGANTCERHICPCGEQVLEVGSHGLSCSLGPGRVPRHTVINDVVYRALLRAGIPSVKEPPDLSRSDGRRPDGLTLIPWNAGRSLIWDVTVADTVAATHLPITSLLAGAAAEAAAVRKNTKYADLTTDYNFLPLAFESFGPISLDAQIFIRQLGRRISESSGDKREGSFLFQRLSMAIQRFNAISFRGTFSVADLEEPDES

SEQ ID NO: 32043 - protein, 984 aa, Metaphire vulgaris
MEPGPSQLSQKRSGLCAVCRTVRRLHCGDGKVHLHGPHSNPCPGSNQPPLHSGSQPTAPVSNIGSNQRDLSAPTSSSLEATANSNVGDDHPGCFVFHPTITSAIAKHVPKSARTTVCQLLIDIINKILANPSIIDHWRDLICFAPIILKQTARGGKRHNQASAFKKRTQNFYAEILENLEILSDASQTSSSKAATRKSRDQMLAASVSSKLEDGNIRAAVRILMSDEEPVTPDPQTYQELLGKHPSPPEDRVHMPPASDCAPLRVSEEDVRTRIRSFPAGSSGGPDGLRPQIVAELITCPEAGSRLVSAITGLINLLLSGTCPDQVRPILFGGTLLALRKKAGGLRPIAIGYFWRRLASKCAANFALSRVSDYLAPLQVGVGCPGGCEAAVHATRRFLDAMPDDNVIVKLDFSNAFNSVQRDRMLTALTNILPELSKYGLLSYGSPSLLKFGKFRLSSQMGPQQGDPLGPLLFCLPLQPILRKLTAALILGYLDDVTLGGDANSVASDVAVIERECKELGLSLNHRKCEIISKGLIPATDTSLDIFQRIEPQDAILLGAPLSITKAFGSLMSHRSNELNLALNRLTLIAKQDALILLRMSLTHSKLLHLLRCTPCTGHPLLENFDDAMREGLNQILNLRLSDSQWVQATLPIRDGGLGIRRVSALAPSAFLASAASTRDLQSSILLKASLPTDPRETEMIAQWREMSQMDNPGSGPLHKQSTWDRPLILREFNHLLQSDQRQYHQARLRAVSAEHAGDWLYALPIASCGLRLDDEAVRIVVGLRLGANTCERHICPCGEQVLEVGSHGLSCSLGPGRVPRHTMINDVVYRALLRAGIPSVKEPPDLSRSDGRRPDGLTLIPWHAGRSLIWDVTVADTVAATHLPITSLLAGAAAEAAAVRKNTKYADLTTDYNFLPLAFESFGPISLDAQIFIRQLGRRISESSGDKREGSFLFQRLSMAIQRFNAISFRGTFSVADLEEPDES

SEQ ID NO: 32044 - protein, 984 aa, Metaphire vulgaris
MEPGPSQLSQKRSGLCAVCRTVRRLHCGDGKVHLHRPHSNPCPGSNQPPLHSGSQPTAPVSNVGSNQRDLSAPTSSSLEATANSNDGDDHPGCFVFHPTITSAIAKHVPKSVRTTVCQLLIDIINKILANPSIIDHWRDLICFAPIILKQTARGGKRHNQASAFKTRTQNFYAELHENIEILSDASQTLSSKTATRKSRDQMLAASVSSKLEDGNIRAAVRILMSDEEPVTPDPQTYQELLGKHPSPTEDRVHMPPASDCAPLRVSEEDVRARIRSFPTGSSGGPDGLRPQIVAELITCPEAGSRLVSAITGLINLLLSGTCPDQVRPILFGGTLLALRKKAGGLRPIAIGYFWRRLTSKCAANFALSRVSDYLAPLQVGVGCPGGCEAAVHATRRFLDAMPDDNVIVKLDFSNAFNSVQRDRMLTALTNILPELSKYGLLPYGSPSLLKFGKFRLSSQMGPQQGDPIGPLLFCLPLQPIQRKLTAALTLGYLDDVTLGGNANTVASDVAVIERECKELGLSLNHRNCEIISKGPIPATDTSLDSFQRIEPQDAILLGAPLSITQAFGSLMSHRSNELNMALNRLTLIAKQDALILLRMSLTHSKLLHLLRCTPCTGHPLLENFDDAMREGLNQILNLRLSDSQWVQATLPIRDGELEIRRVSALAPSAFLASAASTRDLQSSILLKASLPTDPRETEIIAQWREMSQMDNPGSGPLHKQSTWDRPLILREFNHLLQSDQRQYHQARLRTVSAEHAGDWLYALPIASCGLRMDDEAVRIVVGLRLGANTCERHICACGEQVLEVGSHGLYCSLGPGRVPRHAMINDVIYRALLRAGIPSVKEPPDLSRSDGRRPDGLTLIPWNAGRSLIWDVTVADTVAATHPPITSLLAGAAAEAAAVRKNTKYADLTTDYNFLPLAFESFGPISLDAQIFIKQLGRRISESSGDKREGSFLFQRLSMAIQRFNAISFRGTFSVADLEEPDES

SEQ ID NO: 32045 - protein, 990 aa, Metaphire vulgaris
MAEPAAAQLSQKASGLCAVCRTVRRLHNGDGRVHLHGPHSSPCPGSNQPPLGINSSNDPNLAGATTRSSRIETRSVSPTNASTLAAAHVQSDDVNTNDAATVFHPTLLGPMVKHVPKAARPVLSQLLTNIINKILASPSTIDHWRDLICFAPIILRQLPRGGRKHNTSSVFKKRAQNFAEELHTNIQSVSSGAGPASAKLPNRKSRNQVLAASVSSKLEDGNVRAAVRILMSDEEPVTPNAQTFEELRAKHPTPTPDRAQMPPISDCPPLQVSEEEIRNRIRSFPAGSSGGPDGLRPQIVAELIAGSEAGSRLLSAITGLTNLLLAGTCPIQVQPILFGGNLLALRKPSGGLRPIAIGYFWRRLASKCAANFAMTRAPEYLAPLQVGVGCPGGCEAAVHSARRYLEAMPNNHVLVKLDFSNAFNSVLRDSMLTALADLLPELSAYGYLSYGIPSILKFGPYLLPSQMGPQQGDPLGPLLFCLPMQPVLQKLKATLTLGYLDDITLGGEAKVVAGDVSALEEGCAELGLSLNYQKCEVVCKGPAPIANTVLEHFQSIHPQEATLLGAPLSTAEAFETLMSRRITELHTALSRLPLIHTQDALILLKLSLTHTKLLYMLRCTPCTGHPLLESFDDTMRQGLSRILNMRLSDHQWVQATLPIRDGGLGIRRVSSLASSAFLASAASTRGLQSSILQKAGLAIDSHEAAILTKWSLESQIPIPASGSLDKQATWDRPIILREMTNLLSSDLSQYHQARLRAVAAEHASDWLHALPISSCGLRLDDETIRVAVGLRLGAFICERHLCPCGEQVQENGSHGLSCKLGPGRLARHSMLNDVVYRALVRAGIPSVKEPPGLLRSDGKRPDGMTMIPWQAGRCLVWDVTVADTVAATHLPLTSLSTGAAAEAASVRKVAKYTDLSADYFFLPLAFETLGPISHDALTFIKELGRHLSVLSGDTRERSFLLQRISMTLQRFNAIAFQGTFSASDPGQDES

SEQ ID NO: 32046 - protein, 965 aa, Metaphire vulgaris
MAEPAAAQLSQKASGLCAVCRTVRRLHNGDGRVHLHGPHSNPCPGSNQPPLGINSSNDPNLAGATTRSSRIETRSVSPTNASTPAAAQVQSDYVNTNDAATVFHPTLLGPMVKHVAKAARPALSQLLTNIISKILASPSTIDHWRDLICFAPIILRQLPRGGRKHNTSSVFKKRAQNFAEELHTNIQSVSSGAGPASAKLPNRKSRNQVLAASVSSKLEDGNVRAAVRILMSDEEPVTPNAQTLEELRAKHPTPTPDRVQMPPISDCPPLQVSEEEIRNRIRSFPTGSSGGPDGLRPQIVAELIAGSEAGSRLLSAITGLTNLLLAGTCPIQVQPILFGGNLLALRKPSGGLRPIAIGYFWRRLASKCAANFAMTRAPEYLAPLQVGVGCPGGCEAAVHSARRYLEAMPNNHVLVKLDFSNAFNSVLRDSMLTALADLLPELSAYGHLSYGSPSILKFGHYLLPSQMGPQQGDPLGPLLFCLPMQPVLQKLKATLTLGYLDDITLGGEAKVVAGDVSVLEEGCAELGLSLNYQKCEVVCKGPAPIANTVLEHFQSIHPQEATLLGAPLSTAEAFETLMSRRITELHTALSRLPLIHTQDALILLKLSLTHTKLLYMLRCTPCTGHPLLESFDDTMRQGLSRILNMRLSNNQWVQATLPIRDGGLGIRRVSSLASSAFLASAASTRGLQSSILQKAGLAIDSHEAAILTKWSLQSQIPIPASGSLVKQATWDRPIILREMTNLLSSDLSQYHQARLRAVAAEHASDWLHALPISSCGLRLDDETIRVAVGLRLGAFICERHLCPCGEQVQENGSHGLSCKLGPGRLARHSMLNDVVYRALVRAGIPSVKEPPGLLRSDGKRPDGMTMIPWQAGRCLVWDVTVADTVAATHLPLTSLSTGAAAEAASVRKVAKYTDLSADYFFLPLAFETLGPISHDALTFIKELGRHLSVLSGDTRERSFCSNAFP

SEQ ID NO: 32047 - protein, 965 aa, Metaphire vulgaris
MAEPAAAQLSQKASGLCAVCRTVRRLHNGDGRVHLHGPHSNPCPGSNQPPLGINSSKDPNLAGATTRSSHIETRSVSPTNASTPAAAQVQSDDVNTNDAATVFHPTLLGPMVKHVPKAARPALSQLLTNIINRILASPSTIDHWRDLICFAPIILRQLPRGGRKHNTSSVFKKRAQNFAEELHTNIQSVSSGAGPASAKLPNRKSRNQMLASSVSSKLEDGNVRAAVRILMSDEEPVTTNAQTLEELRAKHPTPTSDRVQMPPISDCPPLQVSEEEIRNRIRSFPTGSSGGPDGLRPQIVAELIAGSEAGSRLLSAITGLTNLLLAGTCPIQVQPILFGGNLLALRKPSGGLRPIAIGYFWRRLASKCAANFAMTMAPEYLAPLQVGVGCPGGCEAAVHSARRYLEAMPNNHVLVKLDFSNAFNSVLRDSMLTALADLLPELSAYGHLSYGSPSILKFGHYFLPSQMGPQQGDPLGPLLFCLPMQPVLQKLKATLTLGYLDDITLGGEAKVVAGDVSVLEEGCAELGLSLNYQKCEVVCKGPAPIANTVLEHFQSIHPQEATLLGAPLSTAEAFETLMSRRITELHTALSRLPLIHTQDAIILLKLSLTHTKLLYMLRCTPCTGHPLLESFDDTMRQGLSRILNMRLSNNQWVQATLPIGDGGLGVRRVSSLASSAFLASAASTRGLQSSILQKAGLAIDSHEAEILTKWSLESQIPIPASGSLDKQATWDRPIILREITNLLSSDLSQYHQARLRAVAAEHASDWLHALPISSCGLRLDDETTRVAVGLRLGAFICERHLCPCGEQVQENGSHGLSCKLGPGRLARHSMLNDVVYRALVRAGIPSVKELPGLLRSDGKRPDGMTMIPWQAGRCLVWDVTVADTVAATHLSLTYLSTGAAAEAASVRKVAKYTDLSADYFFLPLAFETLGPISYDALTFIKELGRHLSVLSGDTRREVFCSNAFP

SEQ ID NO: 32048 - protein, 760 aa, Metaphire vulgaris
MSDEEPVTPNAQTLEELRAKHPTPTPDRVQMPPISDCPPLQVSEEEIRNRIRFFPTGSSGGSDGLRPQIVAELIAGSEAGSRLLSAITGLTNLLLAGTCPVQAQPILFGGNLLALRKPSGGLRPIAIGYFWRRLASKCAANFAMTRAPEYLAPLQVGVGCPGGCEAAVHSARRYLEAMPNNHVLVKLDFSNAFNSVLRDSMLTALADLLPELSAYGHLSYGSPSILKFGHYLLPSQMGPQQGDPLGPLLFCLPMQPVLQKVKATLTLGYLDDITLGGEAKVVAGDVSGLEEGCAELGLSLNYQKCEVVCKGPAPIANTVLEHFQSIHPQEATLLGAPLSTAEAFETLMSRRITDLHTALSRLPLIHTQDALILLKLSLTHTKLLYMLRCTPCTGHPLLERFDDTMRQGLTKILNMRLSDHQWVQATLPIRDGGLGIRRVSSLASSAFLASAASTRGLQSSILQKAGLAIDSHEAAILTKWSLESQIPIPASGSLDKQATWNRPIILREITNLLSSDLSQYHQARLRAVAAEHASDWLHALPISSCGLRLDDETTRIVVGLRLGAFICERHLCPCGEQVQENGSHGLSCKLGPGRLARHSMLDDVVYRALVRPGPPSAKEPPGLLRSDGKRPDGMTMIPWQAGRCLVWDVTVADTVAATHLPVTSLSPGAAAEAASVRKIAKYTDLSADYFFLPLAFETLGPISHDALTFIKELSRHLSVLSGDTRERSFLLQRISMTLQRFNAIAFQRTFSASDPDQDES

SEQ ID NO: 32049 - protein, 1034 aa, Metaphire vulgaris
MAEPAAAQLSQKASGLCAVCRTVRRLHNGDGRVYLHGPHSNPCPGSNQPPLRTNNSSDPNLPAATNGASRIETRSVSPTNANTPAAAQAQSDDVNTNDVATVFHPTLPGPMVKHVPKAARPALSQLLTNIINKILASPSTIDHWRDLICFAPIILRQLPRGGRKHNTSSVFKKRAQNFAEELHANIQSVSSNTGPASAKLPTRKSRNQMLAASVSSKLEDGNVRAAVRILMSDEEPVTPNAQTFEELRAKHPTPTPDRGQMPPISVCPPLQVSEEEIRNRIRSFPAGSSGGPDGLRPQIVAELIAGSEAGNRLLSAITGLTNLLLAGTCPVQVQPILFGGNLLALRKPSGGLRPIAIGYFWRRLASKCAANFAMTRAPEYLAPLQVGVGCPGGCEAAVHSARRYLEAMPNNHVLVKLDFSNAFNSVLRDSMLTALADLLPELSAYGHLSYGSPSSLKLGHYLLPSQMGPQQGDPLGPLLFCLPVQPVLQKLKATLTLGYLDDITLGGEAKVVAGDVSVLEEGCAELGLSLNYQKCEVVCKGPAQIANTVLEHFQSVHPHEATLLGAPLSTAEAFETLMSRRITELHTALSRLPLIHTQDALILLKLSLTHTKLLYMLRCTPCTGHPLLESFDDTMRQGLSRILNMRLSDHQWVQATLPIRDGGLGIRRVSSLASSAFLASAASTRGLQSSILQKAGLANDSHEAAILTKWSLESQIPIPASGSLDKQATWDRPIILREITNLLSSDLSQYHQARLRAMAAEHASDWLHALPISSCGLRLDDETTRVAVGLRLGAFICERHLCPCGEQVQENGSHGLSCKLGPGRLARHSMLNDVVYRALVRAGIPSAKEPPGLLRSDGKRPDGMTMIPWQAGRCLVWDVTVADTVAATHLPVTSLSPGAAAEAASVRKIAKYTDLSANYLFLPLAFETLGPISHDALTFIKELGRHLSVLSGDTRESFLLQRISMTLQRFNAIAFKGLSLLLVRIKTRAEKYIFFCLRTLSCNKPSGTKYRGHKYIYIYIYIYIYIYIYIYIPS

SEQ ID NO: 32050 - protein, 985 aa, Metaphire vulgaris
MKRIKKIKKKDRTLCRTVRRLHNGDGRVHLHGPHSNPCPGSNQPPLGINSSNDPNLAGTTTRSSRIETRSVSPTNASTPAAAQIQSDDVNTNDAATVFHPTLLGPMVKHVPKAARPVLSQLLTNIINKILASPSTIDHWRDLICFAPIILRQLPRGGRKHNTSSVFKKRAQNFAEELHTNIQSVSSGAGPASAKLPNGKSRNQVLAASVSSKLEDGNVRAAVRILMSDEEPVTPNAQTLEELRAKHPTPTPDRVQMPPISDCPPLQVSEEEIRNRIRSFPAGSSGGPDGLRPQIVAELIAGSEAGSRLLSAITGLTNLLLAGTCPIQVQPILFGGNLLALRKPSGGLRPIAIGYFWRRLASKCAANFAMTRAPEYLAPLQVGVGCPGGCEAAVHSARRYLEAMPNNHVLVKLDFSNAFNSVLRDSMLTALADLLPELSAYGYLSYGSPSSLKFGPYLLPSQMGPQQGDPLGPLLFCLPMQPVLQKLKATLTLGYLDDITLGGEAKVVAGDVSVLEEGCAELGLSLNYQKCEVVCKGPAPIANTVLEHFQSIHPQEATLLGAPLSTAEAFETLMSRRITELHTALSRLPLIHTQDALILLKLSLTHTKLLYMLRCTPCTGHPLLESFDDTMRQGLSRILNMRLSNNQWVQATLPIRDGGLGIRRVSSLASSAFLASAASTRGLQSSILQKAGLAIDSHEAAILTKWSLESQIPIPASGSLDKQATWNRPIILREMTNLLSSDLSQYHQARLRAVAAEHASDWLHALPISSCGLRLDDETIRVAVGLRLGAFICERHLCPCGEQVQENGSHGLSCKLGPCRLARHSMLNDVVYRALVRAGIPSVKEPPGLLRSDGKRPDGMTMIPWQAGRCLVWDVTVADTVAATHLPLTSLSTGAAAEAASVRKVAKYTDLSADYFFLPLAFETLGPISHDALTFIKELGRHLSVLSGDTRERSFLLQRISMTLQRFNAIAFQGTFSASDPGQDES

SEQ ID NO: 32051 - protein, 1095 aa, Gonatopus flavifemur
MLRSRVGPNLRKRDNDRRGPRPAGPTPHSPPSPTPGPSRPAPAASTGHQSTQDSPSSVEDPPTRPPPAPPPSNLPHVCSICGRGFSTSSGLGVHRVRAHPVAANEAVDVVRKRRVWGHEELRLMARREAAATLEGIRFMNQHLLTIVPDRTLEAIKGARRSPAYRDLVAAALEELRIASPGTSSASSSPPLSPEPPVPPRHVSPVRLVPVAPPAVGPGSLSVFRNAIRELIPAVEGVRGWEADILSQLASEFLQGDDIKDGLEAWLMTVFPPTEAPRRTPPPYEQPRTPRAVRRLRRRLEYARMQGIFRHKMSDAAREILDDVKARDDVVPDVKTMSAHWAPFLSCPSNPAPDIPPVPPKPELGYLWAPVSRAEVADVTLPLNAAPGLDRVSVRSWRAVTPSVKALLFNLVLASGGFPSPMLKGRTVFIPKKVEQPSPGDFRPISITSVIVRHLHKILAERLRASGLVGQRQRCFEDGCADNVAVLSTLLYKARKELKELHVASLDVAKAFDSVSHGAITSVLRGCGVPHGLVDYIGHLYANSTTVIQVRGDISDPIQLGRGVRQGDPMSSYLFALVVDRMLTAIPPDVGTRVGQTSVNAIAYADDVLLFASSRWGLQTMLDTVETTANEMGLYFNAAKCSVLSLVPSGKQKKIKVDTTPTFHLADGVHLPQIMANGEWRYLGVNFKTVGPRRVGTDLIGYLDRLTRAPLKPQQRLKILRCFLIPRLFHVLVLGRVTLGKLRALDVQSRAAVRRWLRLPMDTPTAFFHAATADGGLGIPSLSTTIPGLILDRFKALEHASAPFLRATFGEEWVQSRLRWASNALTRDDACLSTKHRRDRWWAQSLYNSVDGRELRECRGSSASTAWIDERSLSIPGRDFVQHVHVFINALPTRIRTSRGVRRGTCPTVCRAGCQVTETAAHVIQGCHRTHGGRILRHYAVCRTLASGLRQKGWTVEEEPRYVTAEGTRKPDLVCLRGESLHVVDSQVVSGSSALDVAHERKVAYYRDNQSLVEALAARHRVGADSIQFSSCTVSWRGVWSSRSADWLLGMGLPKGLLKGITTRVLQGSNTNWSRWNRMTSIAQRGREGLGRQGVG

SEQ ID NO: 32052 - protein, 1265 aa, Helias cama
MKKNTFINYNLRPRRGACRKGSTDAESTITEHFIDEAAARRLPEDAADSTFYPSSPNSSSSHETHNSSLDSFKITTSESSPISSSSASVVQEANANNPVPTAGTTCARKKWTPEMNEFIWRTYLVATNMETDTRHYLDILHKEFNKKFPAMDSSKQRLGDQRRTIIRNKLLSQNVIDSIREEVRTNINSQPNLHTQLYESLEDTHIKRLKWTQEMNETLIKYYYEITGCETNKTAYRSQLRNKFIERYPQLNHLSEQHISDQTRAIISNKYLSESRLVELAKEIQESQSSQQSMTNLLPTFSEENVNTHNSLEESIEVSTETTRENFLNTNLGATSSSLNTHTYLDHLTIDKKFEEVLNLFKMTNPTDRPHIPKQKTTKKLISIVSYINNNILPKHISVDLDFLTTQTLIYSAAYTASVCNGIKIKDIINNLPQTNNKTPEWQKRIENKILLLRKDIGRMTQFLMRNPSRKLLKQVEIIKVKYKTHSKHEEPNLTPDLILDTMKQKLNAYASRLKRYTNCNLRKKQNLQFINNEKVFYRQLALKTEKPHLEISTTPSDDRIVSEEPSEEQLNRFWSDIWANPVQHNTSASWINQESLDNIEPMTYEVIPEETFMNILKKTHSWKSPGSDKLHNFWLKKFTKIHPLLYNHINNFIKDPETIPQYIMEGITYLIPKENNPTHPSKYRPITCLQTIYKILTACISDLVYKHITQNNILAEEQKGCRKGSRGCKEQLIIDSVAMNFAQSHKRNISVMYIDYQKAFDSVPHSWLAYILKHYKIHPTLITFLEKAMSHWSTKLKLLNREITSHTPFIPIRRGIFQGDSFSPLWFCLALNPLSYMLNNTKVGFSIRANGQEKILSHLMYMDDIKLYSNNTKTLHTLADTTQTFSLDIKMNFGIDKCKTLTVVKGKITQNDYPLESGQNITALDHNTSYKYLGFNQIQNINHKVAKQDIMKKFQHRVNIIFRSQLNARNSIKALNTYAIPLLTYSFGVIKWSQSELKSIQCKINKTLTTNRKHHPRSCVQRLTLPRIDGGRGIVDVPNLHNRQITTLRNFFFEQSSRSNLHMVITAADTGITPLKLSDKSAQRNELIVTSAEKIAAWEKKSLHGRHFRDLQETHVDKKASNTWLLRGELFPETEAFMIAIQDQTINTRNYQKYIIRNPNLPTDLCRRCQSSSETIQHIIGACKSIVQTDYKHRHNQVAAIIHQNLAYKYKLIPFKTSYYKYKPSTILENNKYKIYWDRTIITDKTIHFNRPDILVLDKLNKVV

SEQ ID NO: 32053 - protein, 916 aa, Ebrietas anacreon
MTQYIRGNRSRKLIRQVEDMTYTYRVHSKHEEPNLSSELILDTMKQKLNAYASRLKRYTICNLRKKQNSQFINNEKLFYRQLADNNENNHVETLSNGRGNRAEREVPSEEEIHRFWSNVWASPVQHNSCAPWINSENLDKIIPMPFEDIPEQTFLQVLKKAHNWKSPGSDKIHNFWLKTFTKIHPLLYRHINSFIKNPETIPGYIMQGVTYMIPKDKDVTNPSKYRPITCLQTTYKILTGCVSDMVYRHITQNNILAEEQKGCRKGSQGCKEQLIIDSVAMNFASTRKRNISTMYIDYQKAFDSVPHSWLVYILTHYKIHPLIVSFLEVVMSQWSTNLKTLNSDVESRLPCIPIRRGIFQGDSFSPLWFCLALNPLSHILNKTQAGFSIKVNGSQTTLTHLMYMDDIKLYSNNIKTLHLLADTTQTFSSDIQMNFGIDKCKILTVKNGAITQNNYTLESGHIIEALDHNTSYKYLGIKQNHKIDHQSIKKDILKKFQHRLNIILRSQLNARNSIKAINTYAVPLLTYSFGIIKWSQSELRNVQCKINKTLTTHRKHHPRSCVQRLTLPRSEGGRGIIDVTNLHNKQITSLRNFFFERSSNSILHEVITAADLGLTPLKLSNRTSQRNEILTSVSEKLAAWEKKSLHGRHFKDLQQAHIDKKSSNTWLQRGELFPETEAFIMAIQDQTINTRNYQKYIIRTPNLPTDLCRRCQSSSETIQHIIGACKSIVQTDYKHRHDQIAAIVHQNLAYRYKLIPAKTPYYKYKPSTILENKQYKIYWDRTIITDKTVHFNRPDILILDRDSNIVLIIDIAVCNTHNLLNTHAEKMAKYNDLATEIRRQWQVNTVKTVPIIVSTTGVIPKTLINSLKTLKMPSTHTFAKSCNSKYMPNNSKISRFDINPCTSVLGRGPHVVENTP

SEQ ID NO: 32054 - protein, 1351 aa, Cycloglypha thrasibulus
MKQNNFRNYNLRPRRGACRESSANPVSKRTGNFIDEAATGRLPEEAADSTFYSSSPNSSSSNETPIPSRRSFNSRSSSSSSISSSSASVVQEANANNPVPTAGATCARKKWTPEMNEFIWRTYLIATNMETDTRHYLDILYKEFNRKFPAMNSNKQRLGDQRRTIIRNKLLDQNVLDSIRQEVRTNINSQSNFHTQLNENSQDTHIKRLKWTQEMNETLIRFYYEITGCETNKTAYRSQLRNKFIETYPQLSHLSEQHISDQTRAIISNKYLSDSRLVELAQEINKSQNTQQSISNPLSEENVNVQNTLEESGEVFTEITRENFLNDSLCAETTPLNTHTQIIIDKKFEEVLSLFKMSNPTDRPHIPKQKTTKKLISIASYINNNILPKHISDDLDFLSTQALIYSAAYTATVCNDIKIKDRTNNPPQFNNKTPEWQKRIENKILLLRKDIGRMTQFLKGNRSRKLLKQVEIIRIKYKTHSKHEEPNLTPDLILDTMKQKLNAYASRLKRYTICNLRKKQNLQFINNEKLFYRQLALNTERTHSEISTSFSDNRNVSEEPSEEQLHRFWSDIWANPVQHNTSAPWIELESLDKINPMTYEVIPEQTFLTVIKKSHSWKTPGSDKLHNFWFKKFTKIQPLLYKHINNFIKDPSTIPKYIFQGITYLIPKENDPTNPSKYRPITCLQTIYKILTACISDLVYKHITQNNILAEEQKGCRKGSRGCKEQLIIDSVAMNFAQSHKRNISVMYIDYQKAFDSVPHSWLAYILKHYKIHPTLTSFLEMAMSYWSTKLKLLNREITTQTPCIPIRRGIFQGDSFSPLWFCLALNPLSYMLNNTKAGFSIRANGNQKILSHLLYMDDIKLYSNNTKTLHKLADTTQTFSLDIKMNFGIDKCKTLTVVKGEIIQNDYLLEAGHAITALDHNTSYKYLGFNQNQNINHKVTKQDLIKKFQHRVNIILRSQLNSRNSVKALNTYAIPLLTYSFGVIKWSQSELKSIQCKINKTLTTNRKHHPRSCVQRLTLPRAEGGRGIIDVPNLHNRQITTLRNFFFEQSSYSNLHMAITAADTGITPLKLSDKSAQRNELIVKSTEKIAAWEKKSLHGRHFRDLQESHVDKKASNTWLLRGELFPETEAFMIAIQDQTINTRNYQKYIIRNPNLPTDQCRRCHSSSETIQHIIGACKSIVQTDYKHRHNQVAAIIHQNLAYKHKFVPFKISYYKYKPSTILENNKYKIYWDRTVITDKTIHFNRPDILVLDKVNKTVFIIDIAVCNTHNLLSTHAEKMAKYNELAIEIKRQWQVSTVKTVPIIISTTGVIPKTLNTSLKILDMPTTTHILLQKAAILNTCRITRKFLDL

SEQ ID NO: 32055 - protein, 1056 aa, Autochton pseudocellus
MLQSNYTNTNTNIEKIFQETLDRFKHSNPVNRPYIPKQKPCKRLRSIVNFINTKVLPKYMSIEQDFILTQTIIYSAAYTAAICNGTKIKEIANSFQQNKQNIPAWQKRIENKIKLLRKEIGRMTQYVQGNRSRKIEKQIEDIKNKYKTHSKHEGLNITSELILDTMKQKLNVYASRLKRYLNCNLRKTQNNQFINNEKLFYRQLNLNSQKSQIVSPNTNDRNRNVNLTPTEENMRQFWSKIWADSVRHNESAQWIKSENVEYINPMSYEYIPEHIFLKVLKKSHNWKSPGTDNLHNFWYKQFTETHIILHKHINNFINNPELIPEYITQGVTYLIPKEKDSTDPSKYRPITCSQTIYKILTGCISDIVYQHITQNNILAEQQKGCRKGSQGCKEQLIIDSVVINTAHAQKKDISIMYIDYQKAFDSVPHSWLIYILNHYKIHPTIVLFLEKAMGQWSTKLKTLNNQNTPHTPSIPIQRGIFQGDAFSPLWFCLALNPLSHMLNKTKAGFRIKINENRTKLTHLMYMDDIKLYSNSTKTLHALADVTQMFSTDIQMNFGVDKCKTLTIKNGTTVQNDYTLDSGQIIQSLDHNTSYKYLGIQQNQKINHKVIKKDILKKFQHRLNIVLRSQLNARNLIKALNTYAISLLTYSFGIINWSQTELKNIQRNINTSLTTHRKHHPRSCIQRLTLPRIEGGRGITDVVNLHNKQITSLRTFFFEQSLRSNLHKVITAADIRQTPLNLCDRTPQRNEQLVNMSAKTVTWENKSMHGRHYKDLQQPHVDKIASNEWLRRGELFPETEAFMMAIQDQTINTRNYQKYIIQNPNIINDLCRRCQSSSETIQHITGACKSIVQSDYKHRHDQVAAIIHQNLAHKHNFIPHKIPYYKYSPNTILENNNYKIYWDRTIITDKTVHFNRPDITLLDKVHKTVFIIDIAVCNTHNLVSTHTEKMAKYNELSLEIKRQWQVSTVKIVPIIISTTGIIPKTLHTSLNTLQMPPYTQTLLQKAAILNTCGITRKFFLPKKGESKQNTTKIIILQYHLYLCGSFQTIICSILMEL

SEQ ID NO: 32056 - protein, 1252 aa, Pyrgus malvae
MNQFIWRTYLIATNMEKDTRNYLDILHREFNQYFPHMNASKQRLGDQRRTIIRNKYLDSDTLEKIKLEAINYIATHPDSQTQLDIVSQSTQRKRMKWSQEMNEILIKCYYEITNCETNRTAYRTQLRNRFLESYPQLSHLSEQHISDQTRSILSNKYLSENRLKELAEEAKESSNRQENMDCANLATTEESIDLRYNIVNEQEDTSNAQSTENIRNSYLENTNSFPHKEVNIDNRAIDKKFQEVLDLFRDSNPTNRPYIPKQKSSKKLALIVDFINKNLLPQHLSVDQDFITTQTIIYCAAYTATICNGMKIKEVEINSLKTSKNKVPAWQKRIESKILQFRKDIGRMTQFIKGNTSKKLIKHVDIIQNKYKSHSKHEEPNLSPDLILDTIKQKLNAYSSRLRRYTACSLRKKQNIQFSNSEKHFYRQLASNSQKTQPELGIPMNNNTSHTHNKGIEFAAPPEHELHSFWSGIWANPVEHNTSASWIKSENVDKINPMPYEYIPENTFLNILKKSHNWKSPGSDNLHNYWYKKFTRSHPHLHKHINNFIQNPESIPKYIMQGVTYLIPKDRDLTNPSQYRPITCLQTIYKLITGCIADLVHQHVRQNNILAEEQKGCRKGSQGCKEQLIIDAVAMNFAHLHKRNINIMYIDYQKAYDSVPHTWLIYILKHYKVHSAIVSFLEKTMSHWSTVLKTSNTEATTHTPPIPIQRGIFQGDAFSPLWFCLALNPLSHILNNSKAGFTITNQDNKLTLTHLMYMDDIKLYSNSTKTLHQLADITQTFSADIRMNFGIDKCKTLTVKKGTITQIDYTLKSGHIIEALDHNTTYKYLGIQQNQRVNHKIIKNDILKNFRHRLNTIFRTQLNARNTIKAVNTYAIPLLTYSFGIIRWSQSELKRVQCTINKTLTSYRKHHPRSCVQRLTLPRFEGGRGIIDVSNLHNKQITSLRKFFFERSSNSNLHKVIASVDARLTPLALKIKTTQRNEVIIGQKEKIESWEKKALHGRHRKDLLQMHVDKALSNAWLLRGQLFPETESFMMAIQDQTINTRNYQKHIIRNPSLQTDHCRRCQSSSETIQHIIGACKAIVQSDYKHRHDQVAAIIHQHLAHKHNFVSHKTPYYKYKPSTILENSTHKIYWDRTIITDKTVHFNRPDIMLWDKNKKCVFIIDIAVCNTHNLLNTHSEKMAKYNDLAIEIKRQWQVSTVKIVPIIISATGVTPKTLQTSLKTLDIPISIHTLIQKATILNTCRITRKFLNL

SEQ ID NO: 32057 - protein, 1350 aa, Autochton zarex
MRLRSSNKLPQAGTGASRNGESRPEQSCSGSPTYSGGDTVSQTSAQYDTVADHNHDSASVNEIGNTRPTSIPSMSVNVVQEAQANNPVPIPDSKCARKKWTTEMNQFIWRTYLIATNMETNTRHYLDTLHSEFNREFPHMNSSKQRIGDQRRIILRNKLLDHDTLERIKSEVSIHLQTHSNLQTQSNEYSQNTQRRRMRWSNEMNETLIRCYYEITECETNRTAYRSQLRNKFLEIYPQHSDLSEQHISDQTRSIIHNKYISESKLQQITRDIQNLRRSNLPLSNINVTSSENNDNLLNNTFNNENSVVSHINTQNITHNSQNENSSRNFNSSSLQSNNTNIEKIFEETLDRFKYSNPVNRPYIPKQKTCKRLDSIVNFINSNILPKYISIEQDFILTQTIIYSAAYTAAICNGTKIREITNSLHQNRQHNIPAWQKRIENKIQLLRKEIGRMTQYIQGNRSRKLGKQIEDIKNKYTTHSKHEGPNVTPELILDTMKQKLNVYASRLKRYLNCSLRKTQNNQFINNEKLFYRQLNLKTQKSQTGPLNTSDSNINVNLTPTEENMRQFWSKIWADSVQHNESAKWIQSENVENINPMPYEYIPEHIFLKVLKKSHNWKSPGTDNLHNFWYKKFTEIHNVLHRHINNFINNPELIPEYIMQGITYLIPKQKDSTDPSKYRPITCLQTIYKILTGCLTDIIYQHITQNNILAEQQKGCRKGSQGCKEQLIIDSVVINTAFTQKKDISIMYIDYQKAFDSVPHSWLLYILHHYKIHPTIILFLEKAMSQWSTKLKTLNNLITPNTPSIPIRRGIFQGDAFSPLWFCLALNPLSHMLNNAKSGFRIKINENKTKLTHLMYMDDIKLYSNNTKTLHVLADVTQMFSTDIQMNFGVDKCKSLTIKNGTIVQNDYILDSGQIIESLDHNTSYKYLGIQQNRKINHKFVKKDILKKFQHRLNIVFRSQLNARNLIKALNTYAISLLTYSFGTIKWSQTELKNIQRKINTSLTTHRKHHPRSCIQRLTLPRIDGGRGIIDVVNLHNKQITSLRLYFFEQSHSSNLHKVITAADIRLTPLNLYDRTSQRNEQLVNNSAKTATWENKSMHGRHYKDLQQPHVDKIASNEWLRRGELFPETEAFMIAIQDQTINTRNYQKYIIQNPNILNDLCRRCQSSSETIQHITGACKSIVQSDYKHRHDQVAAIIHQNLAHKHNFISHKTPYYKYIPNTILEDNNYKIYWDRTIITDKTVHFNRPDITLLDKINKTVFIIDIAVCNTHNLVSTHTEKMAKYNELSLEIKRQWQVSTVKIVPIIISTTGIIPKSLHTSLNTLQMPPYTQTLLQKAAILNTCRITRKFLDL

SEQ ID NO: 32058 - protein, 1342 aa, Mimoniades versicolor
MQKNYLNTYNLRPRSAACRKTSTDRKLYRSSSLLEEEPKSKHQQEYTTHPLAFFKSPISSSSSDDLSQIHNSSPHSFSNTISRSSSTVSLSAIVVQQANAVETAPTADNSRARRKKWTTEMNQFIWRTYLTATKMETDTRYYLDILYTEFNKKFPHMNATKQRLGDQRRTIIRNKLLDQETLDKIKSEVDTHINTYLTQSAMVTHTNNQIQSIEDFQDTRRKRLKWSQEMNEILIKCYYEITQCETNKTAYRSQIRNKFLDSYPQLSHLSVQNISDQTRAIIQNKYLPEYRLKEIAKESQESMHIQSHKCNDITALDDNTGSNTENREPNPTAIQNTADSNSEARNTSNNNKFYLDYKFIDKKFQEAIDLFKNSNPIERPHIPKQKASKRLMAVVSYINNNLLSNFATIDQDFTTTQTIIYSAAYTATICSGIKIKDFTNTTQTNKDKTPAWQKRIENKILLLRKEIGRMTQYIKGNKSRKLINHIEIITNKYKIHSKHEEPNLSPETILDTMKQKLNAFASRLKRYITSNLRKKQNKQFIQNEKVFYRELSSSTQNTEREFSNTYRKNNRENSEQLQEDLQMFWSQIWANPVQHNASATWLNSENQGKINSMSYEYIPEETFLDVLKKSHNWKSPGSDNLHNFWYKKFTKIQPLLHKHINNFIRCPETIPQYIMQGITYLIPKDKNLTDPSKYRPITCLQTIYKILTGCISVLVYKHITLNNIIAEEQKGCRKSSQGCKEQLIIDSVVLNFAHTHKRNISLMYIDYQKAFDSVPHSWLIFILKYYKIHPTIITFLEKNMNQWSTKLQTYNNKFSPSTPCIPIRRGIFQGDSFSPLWFCLALNPLSHILNTTKAGFSIKIGGTQTILTHLMYMDDIKLYSNDTKSLHLLADITQKFSTDIQMNFGIDKCKTLTVKKGITTHNDYTLESGHTIEPLDHNTSYKYLGIQQHKKINHKHIKEDIIKKFQHRLNTILRSQLNARNMTKALNTYAIPILTYSFGIIRWSQTELKRIQCKINKILTTHRKHHPRSCVQRLTLPRFEGGRGIIDVVNLHNRQITSLRNYFFERTEYSNLHKVITVADCGLTPLTLSDRTPQRNELVMSSSEKIAAWEKKVMHGRHRKDLQQPHIDKVASNTWLLRGDLFPETEAFMLAIQDQTINTRNYQKYIIRNSSLATDLCRRCQSSSETIQHIIGACKSIVQTDYKHRHDQVASIIHQNLAYRYTFIKHKIPYYNYKPSAVLENSRYKIYWDRTIITDKTVHCNRPDILLHDKNNKTVFIIDIAVCNTHNLLNAHAEKIAKYNELATEIKRQWQVSTVKTVPIIISATGVIPKTLYASLEMLTMP

SEQ ID NO: 32059 - protein, 1359 aa, Chiomara georgina
MKKTYLIKYNLRPRRGACQERSADAESKKNETLIDEAADIRSTEDTADSTFNPSSPYSSPSDQIINLSSSSSFNIDSSRSSSISSSSASVVQEAEANNPVPTAGALCARKKWTPEMNEFIWRTYLVATNLEKDTRHYLDILHKEFNRKFPSMNSSKQRLGDQRRAIVRNKLVDQNVLDAIRAEVRTDINLHPNLHSELRENFQDTQKRRLKWNQEMNETLIRHYYEITECETNKTAYRSQLRNKFIETYPQLTYLSEQNISDQTRAIISNKYLSDSRLLEIAKEMQESRRTQHHMINNSTTLFEENVNTHNSVEEPVEISSEITCENMSAINSVRATNSPLNPDTYLDPSIIDTKFEEVLTIFKNLHPVDRPHIPKQKTSKKLVSIVSYINNNVLPKHISTDLDFITTQTLIYCAAYTATVCSGIKINDIYNNFKQFNDKKPKWQERIENKILLLRKDIGRMTQYIKGNPSKKLLRQVEIIKIKHKTHTKHEEPNLSPDLILDTMKQKLNAYASRLRRYTICNLRKRQNLQFINNEKIFYRQLSTDTEKMHSQIPTTLSDNRTTNEEPSEEMLHKFWSDIWANPVQHNTSAPWITLENLDKIDPMTFELIPKQTFLNVIKNSHSWKSPGSDKIHNFWFKKLTKIQPLLYKHINNFIKHPDTIPEYIMQGITYMIPKENNPTNPSKYRPITCLQTTYKLITACISDLVYKHITQYNILAEEQKGCKKGCQGCKEQLIIDSVVMKFAQSTKRNVSVMYIDYQKAFDSVPHSWLAYILKHYKIHPVLITFLEKVMSHWSTKLKLLNREATPHTPCIPIRRGIFQGDSFSPLWFCLALNPLSYLLNNTKAGFNIRAHGIQKTLSHLMYMDDIKLYSNNTKSLHKLADTTQTFSSDIKMNFGIDKCKTLTVVKGKIIQNEYSLQSGHIITALDHNTSYKYLGFNQIHNINHKITKQDIMKKFQHRVNIICRSQLNARNSIKALNTYAIPLLTYSFGIIRWSQTELKNIQCKINKTLTLHRKHHPRSCVQRLTLPRFEGGRGIIDVLNLHNKQITTLRNFFFERSTISSLHTVITTADKGITPLNLSDKSTQRNELIIKPSEKIAAWDKKSLHGRHFKDIHEAHIDKKASNTWLLRGELFPETEAFMIAIQDQTINTRNYQKYIIRNPNLPTDLCRRCQSCSETIQHIIGACKSIVQTDYKHRHNQVAAIIHQNLAYKYKFLPFKTSYYKYKPSTILENNKYKIYWDRTIITDKTIHYNRPDILVLDKTNKAVLLIDIAVCNTHNLLNTHAEKMAKYNELAIEIKRQWQVSTVRIVPIVISTTGVIPKTLNASLKILDMPPTTHILLQKAAILNTCRITRKFLDI

SEQ ID NO: 32060 - protein, 1369 aa, Chiomara georgina
MNMPDMKKINNNRYNLRSRRGVCQEDTMDSESRENLVISSQATVRSISEHTVDSTNLPISINLSSSSHTTHNSSDSFKIISSRSSSISDSSASVVQEANAFNPAPTADASCARKKWTPAMNKFIWRTYLIATNMETDTLHYLDTLYKEFNKEFPHMNASKQRLGDQRRTIIRNKLLDRNTLDTIRSEVSTYIESHPSSQSELCTISQETHRKRMKWTQEMNETLIKCYYEVTDCETNKTAYRSQLRNKFLDLFPQLSHLSEQNISDQTRAIISNKYLSQHRMEELAKEIHDTRNRQQAIFNKDATTENNPQLNLCEALNTEEIHEQTANVLEGSVTNTNLNEVNNSTIVNSVLDPESLTEIFQENLDYFKNSDPICRPHIPKQKTTKRLISIVNHINNEVLPKYIMPEMDFNTMQTLIYSAAYTATICNGFKIRETLGTSQQFKAKKPTWQRRIENKISLLRRNIGRMTQYIRGGRSRKLITQVENMTYTYRMHSKHEEPNLSPELILDTMKQKLNVYASRLKRYTNCYLRKIQNLQFVNNEKLFYRYLNTENINTENTHTETFRSDSCNRTESAITSEEEIHRFWSNIWASPVQHNSSAPWIQSENLDKINPMSFENIPEQTFLQVLKKSQNWKGPGSDKIHNFWLKRFTKVHPILYKHINSFVKNPEIIPGYIMQGVTYMIPKDKDVTNPSKYRPITCLQTIYKILTGCISDLVYKHITQNNILAEEQKGCRKGSQGCKEQLIIDSVVMNFAHTRKRNISTMYIDYQKAFDSVPHSWLVYILSHYKINPILVSFLEVVMSQWATTLKISNSKVEPCLPCIPIRRGIFQGDSFSPLWFCLALNPLSRILNNTKAGFIIKSNDCKTTLSHLMYMDDIKLYSNNTKTLHSLADITQTFSSDIHMNFGIDKCKILTVKNGAITQNSYTLQSGHIIEALDHNTSYKYLGIHQNFKIDHINIKKDITKKFQHRLNIILRSQLNARNSIKALNTYAIPLLTYSFGIIKWSQSELKNIQCKINKTLTTHRKHHPRSCVQRLTLPRTEGGRGIIDVTNLHNRQITSLRKFFFERSSDSTLHGVIVGADLSLTPLKLCDKTSQRNELLINVSEKLAAWEKKSLHGRHFKDLKQAHVDKKASNTWLQRGELFPETEAFMMAIQDQTINTRNFQKHIIRNPNLLTDLCRRCQSSSETIQHIIGACKSIVQTDYKHRHDQVAAIIHQNLAYKHNLIPVQTPYYKYKPSTILENKRYKIYWDRTIITDKTVHFNRPDILMLDRDTKTVLIIDIAICNTHNLLNTHAEKMAKYNDLAIEIRRQWQVSTVKTVPIVLSTTGVIPKTLHTSLKTLNMPSTTHILLQKAAILNTCRITRKFLDLP

SEQ ID NO: 32061 - protein, 1348 aa, Spathilepia clonius
MRLRSGNKLPQAGTGAKRDGESRPEPSYSGSPTYSGGDAVSQTSAQYSTVAERNHDLPSVVQTVDTRLSTIPPLSANVVQEAQANNPVPITDSKCARKKWTTDMNQFIWRTYLIATNMETNTRHYLDILHSEFNRKFPHMNSSRQRVGDQRRIILRNKLLDHETIERIKSEVSTYIQTHPNLQTQSNDFSQNAQRKRMKWSHEMNETLIRCYYEITECERNRTAYRSQLRNKFLDIYPQLFDLSEQHISDQTRSIIHNKYIPENRLQEIAKQVQNSRRSQQQLSNINTTTSQHNGDLHNTFNNEVGEVINTNTQNDTNNFGNTNRSHNRSTYMPHLNYTNIDKIFQETLERFKHVGPVNRPYIPKQKPSKRLGSIVHYINTNLLPKYISNEDDFILTQSIIYSAAYTASVCNGTKIRETTYTLHQNRQNVPAWQKRIENKIQLLRKEIGRMTQYVQGSRSRKLDKQIEDIKNKYIIHSKHEGPNVTPELTLDTMKQKLKVFASRLKRYLICNLRKTQNNQFINNEKIFYRQLNLNTQKSQIDSPYADNGDRHANLTPTEEETCQFWSKIWADSVQHNASAKWIKSENLENINPMIYDSIPVHTFLKVLKKSHNWKSPGTDNLHNFWYKQFTETHTVLHKHINNFINNPKSIPEYIMHGVTYLIPKHKHTADPSNYRPITCLQTIYKILTGCISDIVSQHVTQNNILAEQQKGCRKGSQGCKEQLIIDAVVMNTAHTQKKDISIMYIDYQKAFDSVPHSWLIYILNHYKIHPTIISFLEKAMIHWSTKLKTHQTQITPHTPSIPIKRGIFQGDAFSPLWFCLALNPLSHMLNKTKAGFRIKIDESQTTLTHLMYMDDIKLYSNNTKTLHVLADAAQTFSTDIQMNFGVDKCKTLTVKKGTIIQNNYTLQSGQIIESLDHNTSYKYLGIQQNQRINHKIIKKNITRKFQHRLNIVLRSQLNARNLVKALNTYAIPLLTYSFGIIKWSQTELKTIQRNINTSLTSQRKHHPRSCVQRLTLPRAEGGRGIIDVVNLHNKLITSLRTFFFDQTLRSNLHKVITAADNGLTPLNLCDRTPQHNEHLVKLSDKIATWESKSMHGRHYKDLQQPHVDKIASNEWLRRGELFPETEAFMIAIQDQTINTKNYQKHIIKNPNLLNDLCRRCQSSSETIQHITGACKSIVQSDYKHRHDQVAAIIHQNLAHKHTFIPHKIPYYKYIPETILENTHYKIYWDRTIITDKTVHFNRPDITLLDKINKTVFIIDIAVCNTHNLVSTHTEKMAKYNELAIEIKRQWQVSTVKTVPIIISTTGIIPKSLHTSLNTLQMPPYTQSLLQKAAILNTCRITRKFLDL

SEQ ID NO: 32062 - protein, 1329 aa, Epargyreus clarus
MENPAPSHQARAVPTYSGGDTVSQTSAQYSTVADFNHDLVSVVESVNTSPSSTPPLSANVVQEAQASNPVPIADTKCARKKWTTEMNQFIWRTYLIATNMETNTRQYLDTLHTEFNSKFPHMNSSKQRVGDQRRIIVRNKILDHETLERIKSEVSTYIQSHPNLQTQTQDCSQNTQRRRMKWSNEMNETLIRCYYEITECETNRTAYRSQLRNKFLDIYPQLSDLSEQHISDQTRSIIHNKYIPESRLQEIAKDIQNSRRTHQQLNIINVTTSENNINLNNTYNNEETEVSHTNTQNTSRNCQNVSRSRYLNSSTLNLNYTNIDNIFKETLDRFKNSNPVNRPRIPKQKPCKILSSIVRYLNTNLLPKYISIEHDFTLTQTIIYSAAYTAAVCNGTKIRETANTLHRNGKQNIPSWQRRIENKIQLLRKEIGRMTQYIKGNRSRKLDKKIEDIKNKYIIHSKHEGPNDTPELILDTMKQKLNAFASRLKRYLICNLRKTQNNQFINNEKVFYRELNLNTPQINSSNTNINNRNVNVKPTEEEMCQYWSKIWASSVEHNASARWIKLENLESVSPMSYEYIPENTFLKVLKKSHNWKCPGSDNLHNFWYKQFTATHLILHKHINNFISNPHSIPEYIMQGVTYLIPKNKNTADPSKYRPITCLQTIYKILTGCISDIVYQHITQNNILAEQQKGCRKGSQGCKEQLVIDAVVMNTAYTQKKDISIMYIDYQKAFDSVPHSWLIYILNHYKIHPTIITFLEIAMSHWSTKLKTHETEITPHTPSIPIRRGIFQGDAFSPLWFCLALNPLSYMLNKSKAGFRVKINQSQTTLTHLMYMDDIKLYSNNTKSLHALADATQTFSKDIQMNFGVDKCKTLTVKNGTIVQNDYTLDSGQIIESLDHNTSYKYLGIQQNQKINHKVIKKDILKKFQHRLNIVLRSQLNARNLIKALNTYAIPLLTYSFGTIRWSQTELKNIQRNINTSLTTHRKHHPRSCVQRLTLPRIEGGRGIIDVVNLHNKQITSLRTFFFDQTLKSKLHKVITAADTGLTPLNLCDRTPQHNEQLVNISDKLATWEKKSMHGRHYKDLQQPHVDKAASNEWLRRGELFPETEAFMMAIQDQTINTRNYQKHIIKNPNILNDLCRRCQSSPETIQHITGACKSIVQSDYKHRHDQVAAIIHQNLAHKHNFIPHKISYYKYIPDTILENNNYKIYWDRTIITDKTVHFNRPDITLLDKINKTVFIVDIAVCNTHNLVSTHTEKMAKYNELAIEIKRQWQVNTVKTVPIIISTTGVIPKTLHISLNTLQMPPYTQSLLQKAAILNTCRITRKFLDL

SEQ ID NO: 32063 - protein, 1344 aa, Pyrgus malvae
MKKNKTNTYNLRPRSCACRKSSSDAHSLSKKSSSSSTSLDKFSLQESSYSERTNSSSSSISPTPANVVQEADANNLAPTVGTTCARKKWTSEMNQFIWRTYLIATNMEKDTRNYLDILHREFNQYFPHMNASKQRLGDQRRTIIRNKYLDSDTLEKIKLEAINYIATHPDSQTQLDIVSQSTQRKRMKWSQEMNEILIKCYYEITNCETNRTAYRTQLRNRFLESYPQLSHLSEQHISDQTRSILSNKYLSENRLKELAEEAKESSNRQENMDCANLATTEESIDLRYNIVNEQEDTSNAQSTENIRNSYLENTNSLTHKEVNIDNRAIDKKFQEVLDLFRDSNPTNRPYIPKQKSSKKLALIVDFINKNLLPQHLSVDQDFITTQTIIYCAAYTATICNGMKIKEVEINSLKTSKNKVPAWQKRIESKILQFRKDIGRMTQFIKGNTSKKLIKHVDIIQNKYKSHSKHEEPNLSPDLILDTIKQKLNAYSSRLRRYTACSLRKKQNIQFSNSEKHFYRQLASNSQKTQPELGIPMNNNTSHTHNKGIEFAAPPEHELHSFWSGIWANPVEHNTSASWIESENVDKINPMPYEYIPENTFLNILKKSHNWKSPGSDNLHNYWYKKFTRSHPHLHKHINNFIQNPESIPKYIMQGVTYLIPKDRDLTNPSQYRPITCLQTIYKLITGCIADLVHQHVRQNNILAEEQKGCRKGSQGCKEQLIIDAVAMNFAHLHKRNINIMYIDYQKAYDSVPHTWLIYILKHYKVHSAIVSFLEKTMSHWSTVLKTSNTEATTHTPPIPIQRGIFQGDAFSPLWFCLALNPLSHILNNSKAGFTITNQDNKLTLTHLMYMDDIKLYSNSTKTLHQLADITQTFSADIRMNFGIDKCKTLTVKKGTITQNDYTLKSGHIIEALDHNTTYKYLGIQQNQRVNHKIIKNDILKNFRHRLNTIFRTQLNARNTIKAVNTYAIPLLTYSFGIIRWSQSELKRVQCTINKTLTSYRKHHPRSCVQRLTLPRFEGGRGIIDVSNLHNKQITSLRKFFFERSSNSNLHKVIASVDARLTPLALKIKTTQRNEVIIGQKEKIESWVKKALHGRHRKDLLQTPVDKALSNAWLLRGQLFPETESFMMAIQDQTINTRNYQKHIIRNPSLQTDHCRRCQSSSETIQHIIGACKAIVQSDYKHRHDQVAAIIHQHLAHKHNFVSHKTPYYKYKPSTILENSTHKIYWDRTIITDKTVHFNRPDIMLWDKNKKCVFIIDIAVCNTHNLLNTHSEKMAKYNDLAIEIKRQWQVSTVKIVPIIISATGVTPKTLQTSLKTLDIPISIHTLIQNATILNTRRITRKFLNL

SEQ ID NO: 32064 - protein, 1366 aa, Camptopleura auxo
MKKMNTNKYNLRPRRGVCREESVDSEYNMRENLDINSQTVVRSLQDYTVELTNYPISPNSSSSSYETQNSSDSFDTINSKSSSVSVSSASVVQEANAINPVPTADATCARKKWTPEMNKFIWRTYLIATNMETDTLHYLDTLHREFNTEFPHMNASKQRLGDQRRTIIRNKLLDQNTLDSIKLEVRTCIDSHPSLQCELRDSQEIQRKRMKWTKEMNETLIKCYYEVTECETNKTAYRCQLRNKFLEVYPQFSYLSEQHISDQTRAIISNKYLPAHRMKELANEIRKLRNTQQSIVNINTSENNPNFYFYETPNTGGIFEETSHIIGENIENNSSHCTPSNSINISSNTHSFLNAEFIEKKFQETLNYFENSDPICRPHIPKQKTTKRLISITNYINTDILPKYISTEQDFITIQTIIYSAAYTASICNGVKIRETLSTSQHFKDKKPTWQRRIENKISLLRKNIGRMTQYLKGSRSRKLIRQVEDMTYKYRLHSKHEEPNLTPELILDTMKQKLNVYASRLKRYTICNLRKKQNLQFINNEKLFYRQLAINNENTHIKTLNTVNDNRAEREVPSEEEIHRFWSNVWASPVQHNSCAPWIKSENLDKINPMPFENIPEQTFLQVLKKAHNWKSPGSDKIHNFWLKRFTKIHPLLYKHINSFIKNPDIIPGYIMQGVTYMIPKDKDVTNPSKYRPITCLQTTYKILTGCISDIVYKHITQNNILAEEQKGCRKGSQGCKEQLIIDSVVMNFANTRKRNISTMYIDYQKAFDSVPHSWLVYILTHYKIHPLIVSFLEVVMGQWSTHLKILNSDVESHSPCIPIRRGIFQGDSFSPLWFCLALNPLSHILNKAQAGFSIKINGNRTTLTHLMYMDDIKLYSNSIKTLHLLADTTQKFSSDIQMNFGIDKCKVLTVKNGVITQNNYTLESGNIIEALDHNTSYKYLGIKQNYKIDHQNIKKDIIKKFQHRLNIILRSQLNARNSIKAINTYAVPLLTYSFGIIRWSQSELRNVQCKINKTLTTYRKHHPRSCVQRLTLPRTEGGRGIIDVTNLHNKQITSLRKFFFERSSNSILHEVITAADLGLTPLKLSDKTSQRNENLTNVSEKLAAWEKKSLHGRHFKDLQQAHVDKKSSNTWLQRGELFPETEAFMMAIQDQTINTRNYQKHIIRNPNLPTDLCRRCQSSSETIQHIIGACKSIVQTDYKYRHDQVAAIVHQNLAFKHKLILVKTPYYKYKPSTILENKQYKIYWDRTIITDKTVHFNRPDILLLDRDSNTVLIIDIAICNTHNLLNTHAEKIAKYNDLATEIKRQWQVSTVKTVPIILSTTGVIPKSLINSLKTLGMPSTTHILLQKAAILNTCRITRKFLDLT

SEQ ID NO: 32065 - protein, 1365 aa, Astraptes hopfferi
MRLRSGNKLPQAGTGANCNGESRPEHSSSGSPTYSGGDTVSQTSAQYSTVADHNHDPSLVVRTTNTRPSSVPSLSENVVQEALASNPVPISDTKFARKKWTTEMNQFIWRTYLIATNMETNTRHYLDMLHSEFNRQFPDMNCSKQRVGDQRRIILRNKLLDQETLEKIKTEVSTYIQTHPNLQSQSNNTQHNTQHNTQHNTQHNTQHNTQQTQAQRRRMKWSHEMNETLIKCYYEITECETNRTAYRSQLRNKFLDVYPQLSDLSEQHISDQTRSIIHNKYISEHRLQEIAKEIQNSRRIHQQLSNMNVTTLEYNDDLHNTINNEDSVVNQTGTQNIMSNFQNANRSRNFNLNYTNIDKIFEETYGQFKHSSPVNRPYIPKQKTCKRFISIVHYINTNILPKYITIEQDFIYTQTLVYTAAYTAAICNGTKIQEYTATSHQNRQNKPAWQKRIENKIQLLRKDIGRMTQYVQGNRSRKLDKHIEDIRNKYIIHCKHEGPNITPELILDTMKQKLNAIASRLKRYLMCNLRKMQNNQFISNEKLFYRQLHLNTQISQTNTININNSQINNLNSTPADEVLHQFWSKIWADSVQHNASAKWIKSENPENINPMSYEHIPEHIFLKVLKKSHNWKSPGTDRLHNFWYKYFTETHAILHKHINNFINDPKSIPEYILQGVTYLIPKQENSTDPSKYRPITCLQTIYKIITGCISDIVYEHITQNNILAEQQKGCRKGSQGCKEQLIIDSVAMNTAHTQKRDISIMYIDYQKAFDSVPHSWLIYILNHYKIHPTIVSFLQNAMNHWSTKLKTHNNHITPDTPAIPIRRGIFQGDAFSPLWFCLALNPLSDMLNKAKAGFRIKTEKKQTTLTHLMYMDDIKLYSNSTKTLHVLADITQKFSTDIQMNFGIDKCKTLTVKNGITVQNDYTLDSGQIIQSLDHNTSYKYLGLQQNQTISHKDIKKDILKKFQHRLNIVLRSQLNARNLVKALNTYAISLLSYSFGTIKWSQTELKSIQRKINSSLTTHRKHHPRSCVQRLTLPRIEGGRGITDVVNLHNKQITSLRSFFFLQTLRSNLHEVITAADTRLTPLNLSDRAPQPNEKVVNMSAKLVTWETKSMHGRHYKDLLQPHVDKAASNEWLRRGELFPETESFMLAIQDQIINTRNYQKHIIQNANFINDLCRRCHSSSETIQHITGACKSIVQSDYKHRHDQVAAIVHQNLAHKHNFIPHKIPYYKYIPSTILENNNFKIYWDRTIITDKTVHFNRPDITLFDKNNKTVFIIDIAVCNTHNLVSTHTEKMTKYNDLAIEIKRQWQVSTVKTVPIIISTTGVIPKTLHTSLNTLQMPPSTQSLLQKAAILNTCRITRKFLDL

SEQ ID NO: 32066 - protein, 1348 aa, Cecropterus confusis
MRLRSSNKLPQAGTGANRNGESRPEQSHSGRPTYSGGDTVSQTSAQYGTVADHNHDSASVIDIGNITPTTIPSSSANVVREAQANNAVPIPDPKCARKKWTAEMNQFIWRTYLIVTNMETNTRHYLDVLHSEFNRKFPHMNCSKQRIGDQRRIILRNKLLDHDTLEKIKSEASIHIQTHPDLQAQSNDYSQNTQRRRMRWSNEMNETLIRCYYEITECETNRTAYRSQLRNKFLDIYPQYSDLSEQHLSDQTRSIIRNKYIPENRLQQIAREIQNSSKSHSTLSNINVTTSENNVNLLNTFNNENSVDNHTNSQYITRNFQNESHSRNFNSSILHSNFTNIEKIFQETLDRFKHSNPVNRPYIPKQKTGKRLSSIVNFINTKILPKHISIEQDFILTQTIIYSAAYTAAICNGTKIKEIANSLHQNKQNIPAWQKRIENKIQLLRKDIGRMTQYVQGNRSRRIEKLIEDIKNKYIIHSKHEGPNITPELILDTMKQKLNVFASRLKRYVNCNLRKTQNNQFINNEKLFYRQLNLNTQKSQTASPNTNDSNINVTPTEENMRQFWSKTWADPVRHNQSAKWIKSENLEYINPMSYEYIPEHIFLQVLKKSHNWKSPGTDNLHNFWYKQFTETHTILHKHINNFIKNPELVPEYIMQGITYLIPKQKDSTDPSKYRPITCLQTIYKILTGCISHIVYEHITANNILAEQQKGCRKGSQGCKEQLIIDSVVINTAYTQKKDISIMYIDYQKAFDSVPHSWLIYILHHYKIHPTIVTFLEKAMSHWSTKLKTHNNQSTPHTCTATYTAPSIPIRRGIFQGDAFSPLWFCLALNPLSHMLNKAKAGFRIKINENQTKLTHLMFMDDIKLYSNNTKTLHVLADVTQMFSTDIQMNFGVEKCKTLTIKNCTIVQNDYTLDSGQIIQSLDHNTSYKYLGIQQNQRINHKVIKKDILKKFQHRLNIVLRSQLNARNLIKALNTYAISLLTYSFGIIKWSQTELKNIQRNINTSLTTHRKHHPRSCTQRLTLPRNEGGRGITDVVNLHNKQITSLRTFFFEQSLRSNLHKVITAADIRQTPLNLCNRTPQRNEQCVNMSAKTVTWENKSMHGRHYKDLQQPHVDKIASNEWLRRGELFPETEAFMIAIQDQTINTRNYQKYIIKNPNIFNDLCRRCQSASETIQHITGACKSIVQSDYKHRHDQVAAIIHQNLAHKHNFIPHKIPYYKYIPNTILENNNYKIYWDRTIFTDKTVHFNRPDITLLDKVNKTVFIIDIAVCNTHNLVSTHTEKIAKYNELSLEIKRQWQVSTVKIVPIIISTTGIIPKTLRTSLNTLQMPPYTQTLLQKATILNAIVVSR

SEQ ID NO: 32067 - protein, 1302 aa, Ardaris sela
MQKTYLNTYNLRPRSGACLKTSTDGKSYRTSSLLEEELKSNHQPEFITHKLSCFRSPNSSSSSDNLSQRHNSSPHSFSNTISRSSSIISLSANVVQQAHAIETAPTADKTRAQRKKWTTEMNQFIWRTYLIATKMETDTRYYLDILYAEFNKKFPNMNASKQRLGDQRRTIIRNKLLDHETLDKIKSEVGTHINTYLTQSDTVTHTNNQTQSIEDFQDTRRKRLKWSQEMNETLIKCYYEITQCETNKTAYRSQIRNKFLDSYPQLSHLSVQNISDQTRAIIQNKYLPEYRLKEIAKELQESRHIQSEKCIDITELDDNIDLITDKRKSNPTTTLNIVTSDSEARNKLNNNKLYLDYKFIDKKFQEALDLFKNSNPIERPHIPKQKTSKRLMAVVSYINNNLLSNFATIDQDFTTTQTILYSAAYTATICSGIKIKDLTNTPRTNIDKTPPWQKRIENKILLLRKDIGRMTQYIKGNKSRKLINHIEIITNKYKIHSKHEEPNLSPETVLDTMKQKLNASASRLKRYITSNLRKKQNTQFIQNEKLFYRHLSSNTKNTEKESSSTSRRNNREHAKPLQEDLQMFWSKIWANSVQHNTSATWLNSENLEKINLMSYEYVPEKTFLDVLKKSHNWKSPGSDNLHNFWYKKFTKIQPLLHKHINNFIRNPESIPQYIMQGITYLIPKDKNLTDPSKYRPITCLQTIYKILTGCISVLVHKHITLNNIIAEEQKGCRKGSQGCKEQLIIDSVVLNFAHTHKRNISLMYIDYQKAFDSVPHSWLIFILKYYKIHPTIITFLEKVMNQWSTKLKTFNHEFSPNTPCIPIRRGIFQGDSFSPLWFCLALNPLSHMLNATKAGFCIKIGDTQTMLTHLMYMDDIKLYSNNTKSLHLLADVTQKFSTDIHMNFGIDKCKTLTVKKGITIHNDYTLESGHTIEALDHNTSYKYLGIQQHQKINHKHIKEDIIKKFQHRLNTILRSQLNARNMIKALNAYAIPLLTYSFGIIRWSQTELKRVQCKINKILTIHRKHHPRSCVQRLTLPRFEGGRGIIDVVNLHNSQITSLRKYFFERTEYSNLHKVITVADCALTPLRLSDRTRQRNELLVSTSEKTAAWEKKAMHGRHFKDLQQPHIDKMASNTWLLRGDLFPETEAFMIAIQDQTINTRNYQKYIIRNSSLATDLCRRCQSSSETIQHIIGACKSIVQTDYKHRHDQVAAIIHQNLAYRYTFIPHKTPYYNYKPSAVLENNRYKIYWDRTIITDKTVHFNRPDILLHDKNTNTVFIIDIAVCNTHNLLNAHAEKMAKYNEL

SEQ ID NO: 32068 - protein, 1348 aa, Autochton potrillo
MLLRSGNKLPQAGTGAKRNGESRPEHSNSGSPTYSGGDTVSQSSVQYSTVTDYNHDSTSVIETVNTRPTSTLSWSTNVVQEAQANNPVPIVDSKCARKKWTTEMNKFIWRTYLIATNMETNTRNYLDTLHSEFNRKFPHMNSSKQRLGDQRRIIFRNKLLDHETLEKIKSDVNTYIQSHPYLQPQLNDFSQNTQRRRIKWSQEMNETLIRLYYEITECETNRTAYRCQLRNKFLDIYPQLSDLSEQNISDQTRSILHNKYITENKLQEIATEIQNSRRSVQPLSDINVTISDNNEDLHNTFINEDSEVIRANTQNRNGNSQNENHTRNSNTLFPHLNYTNIEKIFQETLDRFKQSSPVNRPYIPRQKTCNRLGSIVHHINTNILPKYISFEHDFITTQTIIYSAAYTAAVCNGTKIKETANTLQHNRANIPAWQSRIENKIQLLRKEIGRMTQYVQGNRSRKLDKHIEDIKNKYIIHSKHEAPNVTLELVLDTMKQKLNAYASRLKRYLICNLRKTQNNQFINNEKIFYRQLNLNTQKSQIDSPNTVSNNRNTNLTPTEEDMHQFWSNIWANSVEHNASANWIKSENLEGINPMIYECIPEHTFSKVLKKSHNWKSPGTDNLHNFWYKQFSQIHPILHKHINSFISNPESIPEYITQGITYLIPKQKESADPSKYRPISCLQTIYKILTRCISDIVYQHITQNNILAEQQKGCRKGSQGCKEQLIIDSVIMNTAHSQKKDISIMYIDYQKAFDSVPHSWLIYILNHYKIHPTIVSFLEKAMSHWSTKLKIHNNQITPHSPSIPIRRGIFQGDSFSPLWFCLALNPLSHMLNEAKAGFRIKINKSQTTLTHLMYMDDIKLYSNNTKTLHILADATQTFSTDIQMNFGVDKCKTLTVKNGIIIQNDYTLDTGKNIESLDHNTSYKYLGIQQNQRINHKIIKTDILKKFQHRLNIVLRSQLNARNLIKALNTYSIPLLTYSFGTIKWSQTELKSIQRNINTSLTTHRKHHPRSCIQRLTLPRIEGGRGIIDVVNLHNKQILSLRSFFFEQTLRSNLHKVITAADIKLTPLNLSDRTPQHNEQLVNMSDKIATWQNKSMHGRHYKDLQQPHIDKTASNEWLRRGELFPETEAFMIAIQDQTINTRNYQKYIIQNPNLLNDLCRRCQSSSETIQHITGACKSIVQSDYKHRHDQVAAIIHQNIAYKHKFISHKTPYYKYIPNTILENSNYKIYWDRTIITDKTVHFNRPDITLWDKINKTVFIIDIAVCNTHNLVSTHTEKMAKYNELAIEIKRQWQVNTVKTVPIIISTTGIIPKTLHTGLNTLQMPPFTQTLLQKAAILNTCRITRKFLDL

SEQ ID NO: 32069 - protein, 1231 aa, Autochton itylus
METNTRNYLDMLHCEFNRKFPHMNSSKQRVGDQRRIIFRNKLLDHETLEKIKSDVKTYIQNHLNTQPQLNDFSQNTQRRRIKWSQEMNETLIRLYYEVTEFETNRTAYRCQLRNKFLDIYPQFSDLSEQHISDQTRSILHNKYITENKLQEIVKEIQNSRRSLQPLSDINVTISDNNDDLHNTFNNEDSVVTHTNTPNLTGNFQNENRTRNSNTFISHLNYTNIEKIFQETLDRFKHSSPVNRPHIPKQKTCKRLGSIVHHINTIILPKYISIEHNFIFTQTIIYSAAYTAAVCNGAKIKETANTLQQNRQYIPAWQKRIENKIQLLRKEIGRMTQYVQGNRSRKLDKHIEDIRNKYIIHSKHETPNITPELILDTMKQKLNAYASRLKRYIICNLRKTQNNQFLNNEKLFYRQLNLNTQKSQNDSPNSDNNNRNVNLTPTEEDMCQFWSKIWANSVQHNASAEWIKFENIEDINAMFYEYIPEHTFLKVLKKSHNWKSPGTDNLHNYWYKQFTQIHPILHKHINSFINNPESIPEYIMQGITYLIPKQNNSADPSKYRPITCLQTIYKILTGCISDIVYQHITQNNILAEQQKGCRKGSQGCKEQLLIDSVVMNTAHSQKKDISIMYIDYQKAFDSVPHSWLIYILNHYKIHPTIVSFLEKAMSHWSTKLKTHNNQITSHTPSIPIRRGIFQGDAFSPLWFCLALNPLSRMLNKIKAGFRVKINNSQTTLTHLMYMDDIKLYSNNTKTLHILANATQTYSTDIQMNFGVDKCKTLTVKNGIIIQNDYTLDSGKNIESLDHNTSYKYLGIQQNQRINHTIIKKDILKKFQHRLNIILRSQLNARNLIKALNTYAIPLLTYSFGIIKWSQTELKGIQRNISTSLTTHRKHHPRSCIQRLTLPRIEGGRGITDVVNLHNKQISSLRSFFFEQILRSNLHKVITAADIRLTPLNLCDRTPQRNEHLVNMSDKIATWRNKSMHGRHYKDLQQPHIDKIASNEWLRRGELFPETEAFMIAIQDQTINTRNYQKYIIKNPNLLNDVCRRCQSSSETIQHITGACKSIVQSDYKHRHDQVAAIIHQNLAYKHNFILQKTPYYKYVPNTILENNNYKIYWDRTIITDKTVHFNRPDITLLDKINKTVFIIDIAVCNTHNLVSTHTEKMAKYNELAIEIKRQWQVGTVKTVPIIISTTGIVPKTLQTSLNTLQIPRSTQTHIQKAAILNTCRITRKFLDL

SEQ ID NO: 32070 - protein, 1345 aa, Urbanus velinus
MRLRSGYKLPQAGTGANRNGESRPEHSNSGSPTYSGGDTVSQSSAQSSTVADHNHDLTSVIETIHTRPSSTPLISANVVEEAQARNPVPIADSNCARKTWTTEMNQFIWRTYLIATNMETNTRHYLDILHSEFNRKFPHMNSSKQRIGDQRRIILRNKLLDHDTLEKIKSDANIYLQTHTNLPTHSNNYSQNTQRKRMKWSNEMNETLIRCYYEITECEKNRTAYRSQLRNKFLDTYPQLSDLSEQNISDQTRSIIHNKYISENRLREIAKEIQDSHHQLSNINVTLSETNDNLQNTFNDENSADRHTSTQNVTHNFQSTNRSRNFNTHTPYLNHTNIEKIFQETLDRFKHSCPVNRPHIPKQKSCKRLRSIVHYINTNILPKYTSYEQDFMLTQSIIYSAAYTAAVCNGTKIQENANPLHQNRQNVPAWQKRIENKIQVLRREIGRMTQYVRGNRSRKLNKHIEIIKNKYIIHTKHEGPNVTPELILDTMKQKLNAFASRLKRYLICNLRKTQNNQFINNEKLFYRQLNINTQKSQNHSSNTNNSNKNLILTPTEEEMRQFWSKIWADSVQHNASAQWIKAENLEGIDPMYYECIPEHILLKTLKKSHNWKSPGTDKIHNFWYKQFTEIHSLLHKHINNFVTNPQSTPEYIFQGVTYLLPKQKDSSDPSKYRPITCLQTLYKLLTGCISEIVYEHITHNNILAKQQKGCKKGSQGCKEQLIIDSVIMNTAHAKKKDISIMYVDYQKAFDSVPHSWLLYILHHYKIHPTIVSFLEKAMSHWSTKLKTHGNYITQYTPSIPIRRGIFQGDAFSPLWFCLALNPLSHMLNQAKAGFRIKIDGNQTTLTHLMYMDDIKLYSNNTKTLHVLADATQTFSTDIQMNFGVDKCKTLTIKKGIVLQNNYILDSGQTIDSLDHNTTYKYLGIQQNQRIDHKSIKKDILKKFQHRLNIVLRSQLNARNLIKAINTYAIPLLTYSFGIIKWTQTDLKNIQRNINTFLTTHRKHHPRSCIQRLTLPRTDGGRGIIDVINLHNKQITSLRTFFFEHTLISNIHKVITAADTRLTPLNLADRTPQRNEHLVSRSAKSSTWENKSMHGRHYKDLQQPHVDKIASNEWLRRGELFPETEAFMIAIQDQTINTRNYQKHIIKNPNLLNDLCRRCHSSSETIQHITGACKSIVQTDYKHRHDQVAAIIHQNLAHKHNFIPHKIPYYKYTPNTILENNNHKIYWDRTIITDKTVHFNRPDITLLDKTNKTVFLIDIAVCNTHNLVSTHTEKIAKYNELAIEIKRQWQVNTVKTIPIIISTTGVIPKTLQTSLNSLDMPQFTQTLLQKAAILNTCRITRKFLDL

SEQ ID NO: 32071 - protein, 1352 aa, Chioides albofasciatus
MRLRSGNKLPQAGTGANRDGESRPEPSSSGSPTYSGGDTVPQTSAQYSTVADSNHDLVSVVETVNNRPSSTPSLSANVVQEAQASNPVPIVDTKCARKKWTTEMNQFIWRTYLIATNMETNTRHYLDILHTEFNRKFPHMNSSKQRLGDQRRIILRNKLLDHETLEKIRSEVSIHIQTDPNLQTQSSEYSQNTQRRRMKWSHEMNETLIRCYYEITECEANRTAYRSQLRNKFLDIYPQLTDLSEQHISDQTRSIIHNKYIPENRLQEIAKEVQNSRRINQQLSNTNITTLENNDNLHNTFNNEDSEDSHTNTQNAPRNFQNASRSRYLNSATLHLNYANIDKIFIETLDRFKDSSPVNRPHIPKQKTCKILSSIVHYINTNLLPKYLSSDHDFILTQTIIYSAAYTAAVCNGTKIRETTSTVHNNGKQNIPPWQKRIENKIQLLRKEIGRMTKYIQGNRSRKLDKKIEDIKNKYIIHSKQEGPNITPELILDTMKQKLNAFASRLKRYLTCNLRKTQNNQFINNEKVFYRQLNLNTQKTQINSQNIDTNNRNVNLTPLTPNEEEMHQHWSKIWANAVEHNASAKWIKCEDLDSINPMLYEYIPKSTFLKVLKKSHNWKSPGTDNLHNFWYKEFTETHNLLHKHINNFITNPESIPEYIMQGVTYLIPKDKDTTDPSKYRPITCLQTIYKILTGCISDIVYQHITQNNILAEQQKGCRKGSQGCKEQLIIDAVVMNTAYTQKKNISIMYIDYQKAFDSVPHSWLIYILNHYKIHPTIISFLGKVMSHWSTKLKTHETQITPHTPSIPIRRGIFQGDAFSPLWFCLALNPLSCILNKTKAGFRVKTNNSQTTLTHLMYMDDIKLYSTNTKSLHVLADATQTFSKDIQMNFGVDKCKTLTVKNGTIVQNDYTLNSGYIIESLDHNTSYKYLGIQQNQRIDHKLIKKHILKKFQHRLNIVLRSQLNARNLIKALNTYAIPLLTYSFGIIKWSQTELKSIQRNINTSLTTHRKHHPRSCIQRLTLPRIEGGRGIIDVVNLHNKQITSLRTFFFNQTLRSNLHKVITAADVGLTPLNLCDRTPQPNEKIINMSDKLATWANKSMHGRHFKDLQQPHVDKTASNEWLRRGVLFPETEAFMVAIQDQTINTRNYQKHIIKNPNMLNDSCRRCQSSSETIQHITGACKSIVQSDYKHRHDQVAAIIHQNLAHKHNLIPHKTPYYKYIPNTILENNNHKIYWDRTIITDKTVHFNRPDITLLDKINKTVYVIDIAVCNTHNLVNTHTEKMAKYNELAIEIKRQWQVNTVKTVPIIISTTGVIPKTLQLSLNTLQMPKSTQSLLQKAAILNTCRITRKFLDL

SEQ ID NO: 32072 - protein, 1369 aa, Ebrietas anacreon
MNKINTTKYNLRPRRGVCRKESMDSENITIETLGLNSQTVVRSLPEYTGDLTNYPISPNSSSWEIQNSSNSFETINSRSSSISVSSASVVQEANAINPAPTANGTCARKKWTPEMNKFIWRTYLIATNMETNTLHYLDTLHKEFNKEFPHMNSSKQRLGDQRRSIVRNKLLDRNTLDSIRSEVHVYINSHPSLQSERRINSQKTQRKRMKWTKEMNETLIKCYYEVTQCETNKTAYRCQLRNKFLESYPQFSHLSEQHISDQTRAIISNKYIPKNRMMELATEITQLGNTQPTDNQQNSIVSIDSTSENNLNISLHETSNPEGILEELSNVIEENMLNDNTHTNIVNNSKQRNSFLNTDFIDKKFQESLNYFEDSDPISRPHIPKQKTTKQLISIVSYINTDILPKYISTEQDFMTLQRIIYSAAYTASICNGITIKETLSTPQHFKDKKPTWQKRIENKISLLRKNIGRMTQYIRGNRSRKLIKQVENMTYKYRIHSKHEEPNLSSELILDTMKQKLNVYASRLRRYTICDLRKKQNMQFINNEKLFYRQLSNNNENSHIDSLNNGNYNRTEREVPSKEEIHKFWFNVWATPVQHNSSAHWIKSENLDNINPMPFEDIPEQIFLQVLKKSHNWKSPGSDKIHNFWLKRFTKIHSLLYKHVNSFIKNPETIPGFIMQGITHMIPKEKNTINPSKYRPITCLQTIYKILTGCISDIVYKHIIQNNILFEEQKGCRKGSQGCKEQLIIDSVAMNYAHTRKRNISTMYIDYQKAFDSVPHSWLVYILTHYKIHPQIVTFLEVVMSQWTTNLKLWNSEVEPRSPRIPIRRGIFQGDSFSPLWFCLALNPLSHILNKTHAGFSIKINGIQTTLTHLMYMDDIKLYSNSIKTLHLLVDTTQTFSSDIQMNFGIDECKILTVKDGIITHNNYTLESGHIIEALDHNTSYKYLGIKQNYKIDHQCIKKDIIKKFQHRLNIILRSQLNARNSIKAINTYAVPLLTYSFGIIKWSQSELRNIQCKINKTLTAYRKHHPRSCVQRLTLPRTEGGRGIIDVINLHNKQITSLRNFFFERSSNSILHEVITAADLGLTPLKLSDKTPQRNELLTSVSKKLAAWEKKSLHGRHLKDLQLEHVDKKSSNTWLQRGDLFPETEAFMVAIQDQTINTRNYQKYIIRNPNLPTDMCRRCQSSSETIQHITGACKSIVQTDYKHRHDQVAAIIHQNLAYKHKLISTKVPYYKYKPSTIIENKRFKIYWDRTIITDKTVHFNRPDILMLDRDSNTVLIIDIAICNTHNLLKTHAEKMAKYNDLAIEIKRQWQVSTVKTVPIILSTTGVIPKTLNNSLKTLEMPSTTHILLQKATILNTCRITRKFLDIT

SEQ ID NO: 32073 - protein, 1312 aa, Erynnis brizo
MKKTNPIKYNLRPRRGVCREGSTDIESNVTETLNDEAVIGHLQEAAANDLEPTADVICARKKWTTEMNKFIWRTYLIATNMETDTRHYLDILHTEFNRKFPSMNSSKQRLGDQRRTIIRNKLLDQRTLDYIREEVRANINSDPNLHTELCASFQDTQKRRLKWTQEMNETLIRYYYEITECETNKTAYRSQLRTKFIDTYPQSSHLSEQHISDQTRAIISNKYLSDNRLEELAKDIRESRSTQQRMINANTTLLDENFNTHNTLEGGVDAEVGVDAETLNENYAHNNSDADKSPINIKTYLDPLIIDKKFEEVLILFTNSNPTERPHIPKQKTTKKLITIVNYINNDILTKHISIDLDFETTQTIIYSAAYTATVCNGIKIKETFNTLQQSKDKTPEWQKRIENKILLLRKDIGRMTQFMKGGASRKLTKQVEIIKNKYKIHSKHEEPNLSPDLILDTMKQKLNAYASRLKRYTICNLRKKQNLQFINNEKLFYRQLALKTDRIHEETPTTSDKTTETIEPSEELLQRFWSQIWANPKQHNTAAAWIKSENLEKIDPMIYECIPEQTFLNVLKKLHSWKGPGSDKLHNFWFKKFTKIQPIIYKHINNFIRDPETIPEYIMQGITYMIPKGGDTNDPSKYRPITCLQTTYKILTACISDLVYKHITHNKILAEEQKGCRKGSQGCKEQLIIDSVAMNFAQTHKRNISVMYIDYQKAFDSVPHSWLAYILKHYKIHPTLTTFLEKAMSQWSTKLKLLNREITPHTPSIPIRRGIFQGDSFSPLWFCLALNPLSYMLNNTKAGFSIRANGHQTTLTHLMYMDDIKIYSNNTKTLHQLADTTQTFSTDIQMNFGIDKCKTLTVRKGKIIQNDYLLDSGHVIEALDHNTSYKYLGIHQNQNINHELIKKDILKKFQHRVNIILRSQLNARNTIKALNTYAIPLLTYSFGTIRWSQTELKSVQCKLNRTLTTHRKHHPRSCVQRLTLPRAEGGRGIVDVVNLYNKQITALRTFFFERSSNSNLHLVITAADSGLTPLKLNDKSSQRNELIINSSEKLLAWEKKSLHGRHYKDLQHEHVDKKSSNTWLLRGELFPETEAFMIAIQDQTINTRNYQKYIIRNLSLPTDLCRRCQSSSETIQHIIGACKSIVQTDYKHRHDQVAAIVHQNLAYKYKFISQKLPYYKYKPSRKLENDKYKIYWDRTIITDKTIHYNRPDILVLNKTNNTVFIIDIAVCNTHNLQSTHTDKMSKYSELAVEIKRQWQVSTVKTVPIVISTTGIVPKTLNTSLNTLGMPVTTHILLQKAAILNTCRITRKFLDL

SEQ ID NO: 32074 - protein, 1349 aa, Autochton longipennis
MRLRSGYKLPQAGTGANRNGESRPEQSCSGSPTYSGGDTVSQIPAQYGTVADHNHDSTSVNETGSTRPTPIPSLSANVVQEAQANNPVPIADSKCARKKWTSEMNQFIWRTYLIATNMETNTHHYLDILHSEFNRQFPHMNSSKQRIGDQRRTIFRNKLLDHDTLEKIRSEASIHIQNHPNVQAKSNEYSQNTQRRRIRWSNEMNETLIRCYYEITECETNRTAYRSQLRNKFLDIYPQHSDLSEQHISDQTRSIIHNKYISESRLQQITREIQNSRTIQLPISNINVTTSENNGNLLNTINNESNVISHTNTQNTTDNSQNQNRSRNFNSSTLQSNNTHIEEIFEQTLDRFKYLNPVNRPYIPKQKTCRRLGSIVHFINTKILPKYISDEQDFILTQTIIYSAAYTAAICNGTKIREITHSLHQNGEHIPGWQKRIENKIQLLRKEIGRMTQYIHGNRSRKLVKQIEDIKIKYITHSKHESPNVTPELILDTMKQKLNVFASRLKRYLNCTLRKTQNNQFINNEKLFYRQLNLNTQKSQTVTPNTNDSNRNVNLTPAEEESMRQFWSKIWAEPVQHNKLAEWIKSENVEHINPMPYEYIPEHIFLKVLKKSHNWKSPGTDNLHNFWYKKFTETHIILHRHINNFINNPELIPEYIMQGVTYLIPKQKDSTDPSKHRPITCLQTIYKILTGCLSDIVYQHITQNNILAEQQKGCRKGSQGCKEQLIIDSVVVNTAYTQKKDISIMYIDYQKAFDSVPHSWLLYILHHYKIHPTIILFLEKAMSQWSTKLKTLNNLITPYTPPIPIRRGIFQGDAFSPLWFCLALNPLSYMLNKAKAGFQIKTKENKTKLTHLMYMDDIKLYSNNTKTLHVLADVTQMFSTDIHMNFGVDKCKTLTIKNGTIIQNDYILDSGQIIESLDHNTSYKYLGIQQNQRINHKIIKKDILKKFQHRLNIVFRSQLNARNLIKALNTYAIPLLTYSFGTIKWSQTELKNIQRKINTSLTTHRKHHPRSCVQRLTLPRTDGGRGITDVVNLHNKQITSLRLYFFEQSLRSNLHNVITAADIRLTPLNLYDRTPQRNEQLLNMSDKNLTWENKSMHGRHYKDLQQPHVDKVASNEWLRRGELFPETEAFMIAIQDQTINTRNYQKYIIKNPNISNDLCRRCQSSSETIQHITGACKSIVQSDYKHRHDQVAAIIHQNLAHKHHFISHKIPYYKYIPNIILENNNYKIYWDRTIITDKTVHFNRPDITLLDKINKTVFIIDIAVCNTHNLVSTHTEKMAKYNELSLELKRQWQVSTVKIVPIIISTTGIIPKSLHTSLNTLQMPPYTQTLLQKAAILNTCRITRKFLDL

SEQ ID NO: 32075 - protein, 1345 aa, Urbanus esmeraldus
MRLRSGYKLPQTGTGANRNGESRPEHSNSGSPTYSGGDTVSQSSAQYSTVADDNHDLASVVQTVNSSPTSISLSANVVQEALAISPVPIADTQSARKKWTTEMNQFIWRTYLIATNMETNTRHYLDVLHSEFNRQFPEMNCSKQRLGDQRRTIIRNKLLNHETLEKIKSEVRTQVQTHPNLHTQSYNNSQTTQRRRMKWSHEMNETLIRCYYEVTECETNRTAYRSQLRNKFLDIYPQLSDLSEQHISDQTRSIIHNKYIPENRLQEIAKEIQNTNRSHQQQNNYNVIPDSNDDLHNTFNNDDSIASHTNTQNTTSNSRIANRPRNLNPSMPHLNFKNIEKIFQETLDRFKQSSPVNRPHIPKQKTCKRLVSIVNHINTKILPRYISIEHDFITTQTIIYSAAYTAAVCNGTNIKETANTFHQNKQNTPTWQRRIENKIQLLRKEIGRMTQYIQGNRSRKLDRQVEDIKNKYIIHTKHEGPNITPDLILDTMKQKLNAFASRLKRYLTCTLRKTQNIQFIHNEKLFYRQLNLHTQTSQNNPSNTNNNNKHINTPTEEDMHQFWSNIWASSGQHNASAKWIKSENLESITSMPYEYIPEQIFLKVLKKSHNWKSPGTDNLHNFWYKHFTEIHNILHKHINNFINNPESIPEFIMQGVTYMIPKQKDSPDPSKYRPITCLQTIYKILTGCISDIVYQHITQNNILAEQQKGCRKGSQGCKEQLVIDTVVMNTAYTQKKNISIMYIDYQKAFDSVPHSWLIYVLNHYKIHPTIIYFLEKVMNHWSTKLKTHNNPITPHTPSIPIRRGIFQGDAFSPLWFCLALNPLSNMLNKAKAGFRIKINNSQTTLTHLMYMDDIKLYSNNIQTLHVLADATQTFSRDIQMNFGVDKCKTLTVRNGTIVQNDYTLDSGQIIESMDHNTSYKYLGIQQNQRIDHKVIKKDILKKFQHRLNVVLRSQLNARNLTKALNTYAISLLTYSFGTIRWSQTELKNIQRNINTFLSTHRKHHPRSCVQRLTLPRIEGGRGIIDVVNLHNKQITSLRSFFFEQTLRSNLHEVITAADTRLTPLNLSDRAPQPNEKLVNMSSKIATWQNKSMHGRHYKDLQQPHVDKAASNEWLRRGELFPETEAFMLAIQDQIINTRNYQKHIIQNPNFLNDLCRRCHSSSETIQHITGACKSIVQSDYKHRHDQVAAIVHQNLAHKHKFIPHKVPYYKYIPNTILENNNFKIYWDRTIITDKTVHFNRPDITILDKLNRTVFIIDIAVCNTHNLVSTHTEKMAKYNDLAIEIKRQWQVSTVKTVPVIISTTGVIPKTLHTSLNTLQMPPSTQSLLQKAAILNTCRITRKFLDL

SEQ ID NO: 32076 - protein, 1367 aa, Lobocla liliana
MRLRSGIKLPQAGTGVNRNGESRPEQSYSGSPTYSGGGTVSQTSAQCKSVADHNHDSTSVVETVNIRPSSILPLSANVVKEAQANNPEPIADTKCARKKWTIEMNQFIWRTYLIETNMESNTRHYLDRLHSEFNRKFPHMNSSKQRVGDQRRIIIRNKLLDSQTLENIKSEAINYIQTHPNLQTQSNNDSQNTQRKRMKWSQEMNETLIKCYYEITECETNKTAYRSQLRNKFLDMYPQFSYLSEQHISDQTRSIIQNKYIPENRLQDIAKEIKKSIRLHQQLSNINVTQSDININLHNTFNNEDSQTNAHNITRNNRHTNHSRNFNTTIPHLNYTNIEKIFQDTLDRFKSSSPVNRPHIPKQKSCKRLGTVVNFINTNLLPKYVSRDHDFMTIQTIIYSAAYTAAVCNGTKINETANTFQHNRQNIPAWQKRIENKIQLLRKEIGRMTQYIQGNRSRKLSKHIDIIRNKYIIHSKHEGPNVTPELILDTIKQKLNAAASRLKRYLVCNLRKKQNNQFINNEKLFYRQLNLNTQQSQTDSPNIEDINRHINLPTEEEMHQFWSKIWASSIQHDASAKWIKSENLEGINPMFYECIPEHIFLKVLKKSHNWKSPGTDNLHNFWYKHFTQIHSILHKHINNFINDPGSIPEYIMQGITYLVPKHKDSADPAKYRPITCLQTIYKILTGCISDVVYQHITQNNILAEEQKGCRKGSQGCKEQLIIDSVVMNIAQTQKKNISIMYIDYQKAFDSVPHSWLIYILKHYKIHSTIITFLEKAMSHWTTKLKTHYNPITPHTPCIPIRRGIFQGDAFSPLWFCLALNPLSHMLNKAKAGFHIKINNSQTKLTHLMYMDDIKLYSNNTKTLHVLADATQTFSTDIQMNFGVDKCKTLTVEKGTIVQNDYILDSGQIIESLDHNTSYKYLGIQQNQRIKHKIIKKDILKKFKHRLNIIFRSQLNAHNSIKAVNTYAIPILTYSFGTIKWSQTELKSIQRNINTSLTSHRKHHPRSCIQRLTLSRTEGGRGIIDVVNLHNKQIASLRIFFFDQTLRSNLHKVIAEADTRLTPLNLCDRTPQHNETLVNISDKIATWENKVMHGRHYKDLQQPHVDKVASNEWLRRGELFPETEAFMIAIQDQTINTRNYQKYIIKNPNLLNDLCRRCQSSSETIQHITGACKSIVQSDYKYRHDQVAAIIHQNLAHKHNFISHKIPYYKYIPNTILENNNYKIYWDRTIITDKTVHFNRPDIILLDKINRTVFIVDIAVCNTHNIVNTHTEKMAKYNELAIEIKRQWQISTVKIVPIIISTTGIIPKTLHTSLNTLQMPPSTIFILQKSVILNTCRITRKARAVGQTLPLKRENKIKINNNNNIIRK

SEQ ID NO: 32077 - protein, 1348 aa, Astraptes hopfferi
MRLRSGNKLPQAGTEAKRNGESRPEQSCSGSPMYSGGDTVSQTSAQSSTVADHTHDSVSVIETVHIRPSSVPSLSANVVQEAQANNPVPIADSRCARKKWTTEMNQFIWRTYLIATKMETNTRQYLDILHSEFNRKFPHMNSSKQRIGDQRRIILRNKLLDQDTIEKIKSEADIYLQTHTNLSTQSNDYSQNTQRKRMKWSNEMNETLIKCYYEITECETNKTAYRCQLRNKFLDIYPQLSDLSEQHISDQRRSIIHNKYISENRLQVIAREIQGSRRSHQHQSNINLTLSESNDDLQNTFNDEDSIVRHTNTPNVTRNSPNANRSHNFNSYTPFLNYTNIEKTFQETLDRFKHSSPVNRPHIPKQKTCKRLGSIVHHINTNILPKYISIEQDFMLTQTIIYSAAYTAVVCNGTKIKENSNPLHQNRQYTPAWQKRIENKIQILRKEIGRMTQHIQGNRSRKLDKHIEEIKNKYIIHTKHESPNIKPELILDTMKQKLNALASRLKRYLVCNLRKTQNNQFMNNEKLFYRKLNLNTQTPQNDLPNTDNSNSNLNFTPTEEEMHQFWSKIWADSVQHNKSAKWIELENLESISPMSYEYIPEHIFLKVLKKSHNWKSPGTDKLHNFWYKQFTEIHNLLHKHINNFVTNPELIPEYIFHGVTYLIPKQKDSTDPSKYRPITCLQTIYKIITGCISDIVYQHITQNNILAEQQKGCRKGSQGCKEQLIIDSVVMNTAYTQKKNISIMYVDYQKAFDSVPHSWLLYILNHYKIHPTIVSFLKKAMSHWSTKLKTHDNHITPHTPSIPIHRGIFQGDAFSPLWFCLALNPLSQMLNQAKAGFRIKINNNQTILTHLMYMDDIKLYSYNTKTLHILADATQTFSADIKMNFGVDKCKTLTVKNGITIQNNYILDSGQIIDSLDHNTSYKYLGIQQNQRINHKIIKKDILKKFQHRLNIVLRSQLNARNLIKALNTYAIPLLTYSFGIIKWSQTELKYIQRKINTSLTTHRKHHPRSCVQRLTLPRTEGGRGIIDVVNLHNKQIASLRTFFFEHTLKSKLHEVITAADIRQTPLNLSDKTSQRNEHLVSMSVKIATWENKSLHGRHFKDLQQPHVDKIASNEWLRRGELFPETEAFMIAIQDQTINTRNYQKYIIQNPNILNDLCRRCHSGSETIQHITGACKSIVQSDYKHRHDQVAAIIHQNLAHKHKFITYKIPYYKYIPDTILENNNYKIYWDRTIITDKTVHFNRPDIILLDKTNKTVFIIDIAVCNTHNLVSTHTEKMAKYNELSIEIKRQWQVSTVKIVPIIISTTGIIPKTLQTNLNTLEMPKFTQTLLQKAAILNTCRITRKFLDL

SEQ ID NO: 32078 - protein, 1224 aa, Apyrrothrix sp.
METDTRHYLDVLCTEFNKKFPNMNATKQRLGDQRRIIIRNKLLNQETLERIKSQAETHINTYPNNQTQSIEEFQDTRRKRLKWSREMNETLIKHYYEITQCGMNKTAYRSQMRNKFLDSYPQLTHLSEQNISDQTRAIIQNKYLPEYRLKEIAKEFQECRNTQTEECIDITDLDDNVNLNAEKHESISTPILNDANNDSEARHTLISNKSYIDHKVIDKKFQEALDLFKNSNPTERPRIPKQKTSKRLMAVVSYINNILLPNLTKVDQDFTTTQTIIYSAAYTATICSGIKIKDIINTPQTNKDKTPAWQKRIENKILLLRKEIGRMTQFVKGNRSRKLLKHIEIISNKYKIHSKHEEPNLSPEAILDTMKQNLNASASRIKRYITSNLRKKQNTQFIQNEKVFYRQLSSNAQNTEREFSNTPHKNNTGNAAPLQEDLQMFWSNIWANPVHHNAFATWIESENLNKISLMDYEYIPEETFLDVLKKAHNWKSPGSDNLHNFWYKKFTKIQPLLHRHINNFIRNPELIPQYIMQGITYLIPKDKNVTDPSKYRPITCLQTIYKLLTGCISALVYKHITLNNIIAEEQKGCRKGSQGCKEQLIIDSVVLNFAHTQKRNISLMYIDYQKAFDSVPHSWLIFVLKYYKIHPTIITFLEKVMNQWSTKLKTYYTEFPPNTPSIPIRRGIFQGDSFSPLWFCLALNPLSHMLNESKAGFSIKIGSAQTKLTHLMYMDDIKLFSNNTKSLHLLADITQTFSTDIQMNFGIEKCKTLTIKKGIIIYNDYTLESGHTIEAMDDNASYKYLGMQQNQKINHRHIKEDIMKKFRHRLNTIFRSQLNARNMIKALNTYAIPLLTYSFGIIRWSQTELKKVQCKINRTLTTHRKHHPRSCVQRLTLPRAEGGRGILDLLNLHNSQITSLRTYFFKRTENSNLHRVITLADNGLTPLKLRDRTRQRNELLVSTLEKIAAWEKKSMHGRHRKDLQQPHIDKVASNTWLLRGELFPETEAFMMAIQDQTINTRNYQKFIIRSSTLSTDLCRRCQTSSETIQHIIGACKSIVQTDYKHRHDQVAAIIHQNLAYRYTFLPHKIPYYNYKPSTVLENDRYKIYWDRTIITDKTVHCNRPDILLHDKTDKTVLIIDIAVCNTHNLLNAHAEKMAKYNELATEIKRQWQVSTVKTVPIIISATGVIPKTLHTSLEILTMPKTTSILLQKAAILNTCRITRKFLDL

SEQ ID NO: 32079 - protein, 1245 aa, Spathilepia clonius
MNQFIWRTYLIATKMETNTCHYLDVLHSEFNRKFPHMNASKQRVGDQRRIILRNKLLDHETLEKIKLEVSTYIQTHPNLQTQSNDFSQNTQRRRMKWSHEMNETLIRCYYEITECETNRTAYRSQLRNKFLDIYPQLSDLSEQHISDQTRSIIHNKYISESRLQEIAKQVQNSTRTQQELRNINATITEHNDNQRDVFNNENGDVSNANTQNMSRNLRNTKRSRNHNTSVSHLKYTNIDKIFEETLDRFKYSSPVNRPHIPKQKPCKRLGQIVHYINSNLLPKYISIDQDFILTQSIIYSAAYSASVCNGTKIKDTTNTLHTNRTKIPAWQKRIENKIQVLRKEIGRMTQHTLGNRSRKLDKQIEDIKNKYIIHSKHEGPNISPELILDTMKQKLNASASRLKRYLICNLRKTQNNQFINNEKVFYRQLNLNTQMSQIELPHADNSNKNVKLAPTDEEMCQFWSKIWADSVQHNASAKWIKSENTESINPMFYECIPEHTFLNVLKKSHNWKSPGTDNLHNFWYKQFTAIHGVLYKHINNFINNPQSIPEYIMHGVTYLIPKHKNTADPSNYRPITCLQTIYKILTGCISDIVTQHITQNNILAEQQKGCRKGSQGCKEQLIIDAVVMNTAHTQKKDISVMYIDYQKAFDSVPHSWLIYILNHYKIHPTIISFLEKAMCHWSTKLKTHNTHITPHTSSIPIRRGIFQGDAFSPLWFCLALNPLSHMLNKTKAGFRIKNDKSQATLTHLMYMDDIKLYSNNTKTLHALADATQIFSTDIQMNFGVDKCKTLTVKKGTIVRNDYTLDSGLIIESLDHNTSYKYLGIQQNQRINHKVIKKDTLKKFQHRLNIVLRSQLNARNLIKALNTYAIPLLTYSFGTIKWSQTELKNIQRNINTSLTIHRKHHPRSCVQRLTLPRIEGGRGLIDVVNLHNRQITSLRTFFFKQTLTSNLHKVITVADIRLTPLNLCNRTLQRNEQLVSASAKMTAWENKSMHGRHYKDLQQPHVDKAASNEWLRRGELFPETEAFMMAIQDQTINTRNYQRYIIQNPSLLSDLCRRCQSSSETIQHITGACKSIVQSDYKHRHDQVAAIIHQNLAHKHNFIPHKIPYYKYVPDTILENNNCKIYWDRTIITDKTVHFNRPDITLLDKTNRTVFVIDIAVCNTHNLVSTHSEKMAKYNELVIEIKRQWQVSTVKTIPIIISTTGVIPKTLHTSLNTLQMPPSTQTLLQKAAILNTCRITRKFLDL

SEQ ID NO: 32080 - protein, 1365 aa, Eracon sarahburnsae
MKKTNINKYNLRPRPGACRKISADTEPHRISPSPTEELNRRVFVEYRPEHTTDPLRYVISPNSSPSSSSTDRFSEIQSLSPHSFETNISRSSSTSTLSTNVVQEAEAIKLVPIVGKTSARKKWTTEMNQFIWRTYLIATKLETDTRHYLDILHEEFNRKFPSMNSTRQRLGDQRRTIIRNKLLDQDTLKRIKSEVELLINKDPSQLKQIIGNSQNTQRKRVKWTEEMNETLIKIYYKITQCETNKTAYRSQLRKEFTDIYPQLFHLTEQHISDQTRSIISNKYLSENKLKEIADEIQKLSSVHQIDNCVEVTLFEDTDNLDAEKNTIGSTPTVNIVNSNSENTINLITIKPYSDPTVIGKKFEEILQVFKNSNPINRPHIPKQNTSRRLMSIVSHINNNILPKFISIEQDFATTQTIVYSAAYTATICCGIKIKEILDKPTEAKDEIPAWQKRIEDKISQLRQEIGRMTQYIKGNRSRKLLKHVETIKNKYRIHSKHEDPNLSPELILDTMKQKLNVKASRLKRYISCYLRKKQNTQFINNEKLFYRQLSLNTQNTHIKLLHAPSNNDSENTAPLEGELHRFWSNIWSNSTEHNASAEWIKSENLDEINTMSYEYIPEQTFLDVLKKAHNWKSPGSDNIHNFWYKKFTKIHPLLHKHINDFIKTPESIPKYIMQGVTYLIPKDKDRTNPSKYRPITCLQTIYKILTGCITDLVYKHITQNNILAEEQKGCRRGSQGCKEQLIIDSVVINFAHTHKRNINMMYIDYQKAFDSVPHTWLVYILKHYKINPIIVTFLEKAMEHWSTKLKTLDNQLSLNTPCIPIRRGIFQGDSFSPLWFCLALNPLSRLLNKAKAGFCIKIDQKQTTLTHLMYMDDIKLYSNNTKTLHVLADITQTFSSDIQMNFGIDKCKTLTVRKGILVQTDYTLQSGHIIEALDHNTSYKYLGIQQNQKIKHKVIKKDIIKKFKHRLNIILRSQLNARNSIKALNTFAIPLLTYTFGPIRWSQTELKNIQCNLNRILTNHRKHHPRSCVQRLTLPRTEGGRGIIDIVNLHNKQIASLRTFFFNRAEYSNLHKVITVADTGLTPLTLSDKTQQRNELIVNTSDKITEWEKKSMHGRHRKDLQQSHVDKATSNAWLLRGELFPETEAFMMAIQDQTINTRNYQKYIIRNPNLPTDLCRRCQSNSETIQHIIGACKSIVQTDYKHRHDQVAAIIHQNLAQKYAFITRKLPYYKYKPSTILENNKYKIYWDRTIITDKTVHYNRPDILLYDKNNKTVFVIDIAVCNTHNLNNTHSEKMAKYNELAIEIKRQWQVNTVKTVPIIISATGVIPKTLHTSLKTLDMPKSTYILMQKAAILNTCRITRKFLDL

SEQ ID NO: 32081 - protein, 1259 aa, Astraptes brevicauda
MRLRSGNKLPQAGTGANRNGESRPEYPNSGSPTYSGGDTVSQTSAQYSTVADHRHDSSSVVRPVNIIPSSDPPLSANVVQEALASNPVPIADIKSVRKKWTTEMNQFIWRTYLIATNMETNTRHYLDNLHSEFNRQFPHMNCSKQRVGDQRRVILKNKLLDYETLEKIKSEVTTYIQTHPNLQTLPHDYSQNTQRRRMKWSREMNENLIRCYYEVTECETNRTAYRSQVRNKFLDIYPQLSDLSEQHISDQTRSIIHNKYISEHRLQEITQEIQNSRRIHQQASNTNMTTLGNSDDLHNTLNNEDNEVNHTDTQNIISNFQNPNRPRNFNLNYTNIDKIFEETYNRFLHSSPVNRPYIPKQKTCKRLVSIVYYLNTNILPKYILMEQDFIFTQTLIYSAAYTAAVCNGTKIQEITDTSHQNRQNKPAWQKRIENKIQLLRKDIGRMTQYIQGNRSRKLNRHIEDIKKKYVIHSQHEGPNVTPELILDTMKQKLNAFASRLKRYLMCNLRKTQNSQFISNEKLFYRQLNVNTQMSQADSININNSQININSTPTEEVLHRFWSKIWGDSGQHNASAKWLKSENLETINPMSYEYIPEQIFLKVLKKSHNWKSPGTDKLHNFWYKQFTQIHTILHKHINNFINNPESIPEYIMQGVTYLIPKQKDSTDPSKYRPITCLQTIYKILTSCISNIVYQHITQNNILAEQQKGCRKGSQGCKEQLIIDSVAMTTAHTQKKDISIMYIDYQKAFDSVPHSWLIYILNHYKIHPTIVSFLQKVMSQWSTKLKTHNNHTTSHTPSIPIRRGIFQGDAFSPLWFCLALNPLSHMLNKAKAGYRINIDKNQTTLTHLMYMDDIKLYSKNTKTLHILADITQKFSTDIQMNFGIDKCKTLTVKNGITVQNDYTLDSGQIIESLDHNTSYKYLGLQQNQTINHKDIKKDILKKFQHRLNIVLRSQLNARNLVKALNTYAISLLTYSFGTIKWSQTELKNIQRNINTSLTTHRKHHPRSCVQRLTLPRIEGGRGIIDVANLHNKQITSLRSFFFEQTLRSNLHKVITAADIRLTPLNLSDRELQPNEKLVNMSVKLAAWESKSMHGRHYKDLQQPHVDKSASNEWLRRGELFPETESFMLAIQDQIINTRNYQKHIIQNPNFINDLCRRCHSSPETIQHITGACKSIVQSDYKHRHDQIAAIVHQNLAHKYNFIPHKIPYYKYTPSTLLENNNFKIYWDRTIITDKTVHFNRPDITLWDKKKQHGFHNRHSRM

SEQ ID NO: 32082 - protein, 1348 aa, Cecropterus dorantes
MRLRSGNKLPQAGTGANRNGESRPEQFHSGSPTYSGGDTVSQTSAQYGTVADHNHNSSSVIVTRNTRPTSIPSSSANVVREAQADKPVSIPDVKCARKKWTTEMNQFIWRTYLIATNMETNTHHYLDTLHSEFNRKFPHMNSSKQRIGDQRRIILRNKLLDHDTLEKIKLEVSIQIQTHPNLQTQSNDFSQNTQRKRIRWSKEMNETLIRCYYEITECETNRTAYRSQLRNKFLDIYPQCSDLSEQHISDQTRSIIHNKYIPENRLQQIVREIQNSSRPHQPLGNINVTTSENYDNLLSTFNNENSVVSHANAQNITNNFQNENHSCNFNSSTLHSNYTNIEKIFQETLDRFKHSNPVNRPYIPKQKTCKRLYSIVNFINTNILPKYISIEQDFMLTQTVIYSAAYTAAICNGTKIKEIENSFHQDRQNIPAWQKRIENKIQLLRKEIGRMTQYVQGNRSRKLEKNIEEIKNKYKIHSKHESPNITPELILDTMKQKLNVYASRLKRYINCNLRKTQNNQFINNEKIFYRQLNLNTQKSQTVSPNTNDSNRNVNLTPTEENMRQFWSKIWSDSVRHDESAKWIKSENLEHISPMSYEYIPEHIFLKVLKKSHNWKSPGTDNLHNFWYKQFTETHVTLHKHINNFINNPELIPEYIMQGVTYLIPKQKNSTDPSNYRPITCLQTIYKILTGCISDIVYQHITQNNILAEQQKGCRKGSQGCKEQLIIDSVVINTAHTKKKNISIMYIDYQKAFDSVPHSWLIYILNHYKIHPTIVLFLKKAMGQWSTKLKTLNNQITPHTPSIPIRRGIFQGDAFSPLWFCLALNPLSHMLNKAKAGFPIKINENKAKLTHLMYMDDIKLYSNSTKTLHVLADVTQMFSTDIQMNFGVDKCKTLTIKNGTIVQNDYTLDSGQIIESLDHNTSYKYLGIQQNKRINHKIIKKDILKKFQHRLNIILRSQLNARNLIKALNSYAIPLLTYSFGIIKWSQTELKNIQRNINTSLTTHRKHHPRSCTQRLTLPRTEGGRGITDVVNLHNKQITSLRTFFFEQSLRSNLHKVITAADIRLTPLNLYDRAAQRNEQLVNMSTKTVTWENKSMHGRHYKDLQQPHVDKIGSNEWLRRGELFPETEAFMIAIQDQTINTRNYQKYIIKNPNILNDLCRRCQSGSETIQHITGACKSIVQSDYKHRHDQVAAIIHQNLAHKYNFITHKIPYYKYIPKTILENTKYKIYWDRTIITDKTVHFNRPDITLLDKVNKTVFIIDIAVCNTHNLVSTHTEKMAKYNELSLEIKRQWQVSTVKIVPIIISTTGIIPKTLRTSLNMLHMPPYTQTLLQKAAILNTCRITRKFLDL

SEQ ID NO: 32083 - protein, 1375 aa, Nicephellus nicephorus
MKKLHNNNKKCTYNLRPLPRACRNTSTNPRCHGRSTSDDEDTNGQIAIRQFPNPTANIAIQTTSPNSSFSSISLFQTPNSSPSSFQSVNTKLSSISPLSANVVQEAEANNTVPTADNIRARKKWTTEMNQFIWRTYLLATNMETNTRHYLDTLHSEFNRTFPQMNASKQRLGDQRRTILRNKLLDPETLETIRLEVSTYIQTHPNLGTQSNRKNQNTQRRRMKWSSEMNETLIKCYYEITECGTNRTAYRSRLRNKFLDIYPQHSHLSEQHIADQTRSIIRNKYIPENRLHEIAKEIQNSRELCEGESNFNVAPSEVYVNAHNTFNDEENVPSHTNINMDNNLCDIRNLQRTCNLNSSVSPLNYIHVDKIFQDTLEKFKNSDPVNRPHIPRQKMCKRLASVVNYINTNILPKYISVDHDFITTQTIIYSAAYTAAVYNGTKIKEITNTLQHNRQNTPAWQKRIEDKVQQFRKDIGRMTQYIQGNRSRKIVKQMEYIRDKYKIHSKHEGPNVTPELILDTIKQKLNASASRLKRYLACNLRRKQNIQFINNEKLFYKQLNLNAQKSQSNTLKTDSINRNENVTPCDNQMHEFWSKIWSNSVQHNASAKWIKSENPDDINPMLYEHIPEHTFLGVLKKTHNWKSPGTDNLHSFWYKKFTHIHPILYKHINNFINSPETIPEYIMQGVTHLIPKDPQNSTDPSKYRPITCLQTIYKILTGCISDLVYQHVTQNNILTEEQKGCRKGSQGCKEQLIIDSVVMNLAHTQKKNISIMYIDYQKAFDSVPHSWLIYILKHYKIHPTLITFLEKATSHWTTKLRTYNNQISSYTPSIPIRRGIFQGDAFSPLWFCLALNPLSHMLNSAKAGFCIDINNNKTTLTHLMYMDDIKLYSNNTKTLHVLADATQKFSTDIHMNFGVDKCKTLTVTKGVIVSNDYTLKSGQIIESLDHNTSYKYLGIQQNQRVHHRVIKKDITKQFQHRLNIILRSHLNARNLIKALNTYAIPLLTYSFGTIRWSQTELKKIQRNINTTLTTHRKHHPRSCVQRLTLPRTEGGRGIIDVVNLHNKQIASLRTFFFNQTSRSNLHNVITAADTRLTPLNLCDRTPQHNEQLVNISDKIATWGNKSMHGRHFKDLQQPHVDKAASNEWLRRGELFPETEAFMMAIQDQTINTRNYQKFIIRNPKLPSDLCRRCQSSSETIQHIIGACKSIVQTDYKHRHDQVAAIIHQNLAHKHNFITHKIPYYKYIPKTILENNNYKIYWDRTIITDKTVHFNRPDITLFDKSNKTVFIIDIAVCNTHNLVNTHTEKMSKYNELATEIKRQWQVSKVQTVPIVISATGVIPKSLHTSLNTLQMPPSTQTLLQKSAILNTCRITRKFLDL

SEQ ID NO: 32084 - protein, 1354 aa, Heliopetes ericetorum
MNTTKINTYNLRPRSRACRKPSLDATSSTTNLQECMTDFPLHSLSPNSSGSSFGTGYPEQNSSSEITSSISSSTLVLPANVAQEAIANSLVPIAGTTCARKKWTPEMNQFIWRTYLIASNLETDTRNYLDILHKEFNQKFPHMNASKQRLGDQRRTIIRNKYLDLATMEKIKAEVIDYIATHPVPQTQIEMITQNTQKKRMKWSQEMNETLVRSYYEITEVEINRTAYRSQLRSRFIDKYPQLSHLSEQHISDQTRAIISNKYLSESRLREIAREAKELTNTGLIADSGIFENNINSHNTIELNEHENRPPTLPFTQNARKNYPNTTGTLQITGANLDKTFIDNKFQEALNLFKTSCPTHRPYIPKQKSSKKLASIVNYINKNLLPQHISVDQDFVITQTLIYSAAYTASICNGIKIKDIQTNTVQVKDKRPAWQKRIENNIQQLRKEIGRMTQFIKGNTSKKLIKHIQIIKNKYKIHSKHEEPNQSSELILDTIKQKLNAYASRLKRYTACNLRKTQNAQFTTNEKQFYRQLTLSTRKTHTEPEGSKSDKFITNNVIESAEPPVVELYGFWSQIWANPVQHNATASWIKDERFDEINSMSYKYIPENTFLNVLKKSHNWKSPGSDNVHNYWYKKFTQIHPLLHKHINNFVQNPKSIPPYIMQGVTYLIPKDRDLANPSKYRPITCLQTIYKILTGCIAELVYQHVTHNRILAEEQKGCKKGNQGCKEQLIIDSVVMNFAHVNKRNINVMYVDYQKAFDSVPHTWLIYILKHYKVHSTIVNFLEKVMSNWSTVLKISSGETIRNSSPIPIRRGIFQGDAFSPLWFCLALNPLSRMLNNTKLGFSITTDNNKLTLSHLMYMDDIKLYSNSTKTLHQLADITQTFSSDINMNFGIDKCKTLTVKKGKIIQNDYTLESGHVIEALDHNTTYKYLGIQQNQRVNHKAIKNDILKKFKHRLNTIFRSQLNARNTVKAVNTYAIPLLTYSFGIIRWTQTDLKRIQCNINRTLTTFRKHHPRSCVQRLTLPRIEGGRGIIDVLNLHNKQITSLRKFFFEYSSISNLHKVIASADTRLTPLALKDKTPQHNEVAVENVEKISVWENKSMHGRHRKDLQQPHVDKVMSNMWLLRGQLFPETEAFMIAIQDQTINTRNYQKYIIKNPTLPTDLCRRCQSSSETIQHIIGACKSIVQSDYKHRHDQVAAIIHQNLAHKHNFILHKTSYYKYKPDIILESSTHKIYWDRTIITDKTVHFNRPDIILLDKYKKSVFIIDIAVCNTHNLLTTYTEKMAKYNELATEIKRQWQVSTVKTVPIIISATGVTPKTLPMNLKILDIPTSIHTLLQKAVILNTCRITRKFLEL

SEQ ID NO: 32085 - protein, 1339 aa, Telegonus cellus
MRLRSGYKLPQAGTGANRNGESRLEHSSSGSPTYSGGDTVSQSSAQYSTVADVNHDSASVVQTVNTRPISTPTLSANVVQEALAINPVPIADTKCARKKWTTEMNQFIWRTYLTATNMETNTRHYLDILHSEFNRQFPDMNCSKQRVGDQRRIILRNKLLDHETLEKIKSEVSTYLQTHPNLHTQSNDNSQNTQRRRLKWSHEMNETLIRCYYEITECETNRTAYRSQLRNKFLDIYPQLSDLSEQHISDQTRSIIHNRYISDNRLQEITKEIQNTRRAHQQQNNYNVTTSENTFNNDDSIVSHTTTQNITCDSRNVNRNLTSSMPHLNYTNIEKIFQETLDRFRQSSPVHRPHIPKQKTGKRLASIVYHINARLLPKYISIEHDFITIQTIIYSAAYTAAVCNGTKIKETANTSHQNRQNTPAWQKRIENKIQLLRKEIGRMTQYIQGNRSRKLGRHVENIQNKYIIHSKHESPNITHELILDTMKQKLNASASRLKRYLKCSLRKTQNIQFINNEKLFYRQLNLNTQTSQINSPNTDNNNINVNTPTEEEMYQFWSKIWAGSGQHNASATWIKSESLESIIPMPFEYIPEHIFLKVLKKSHNWKSPGTDNLHNFWYKKFTEIHTILHKHINNFINNPESIPEYIMQGVTYMIPKHKDSPDPSKYRPITCLQTVYKILTGCISDIVYQHITENNILAEQQKGCRKGSQGCKEQLIIDSVVMNTAYTQKKDISIMYIDYQKAFDSVPHSWLIYILNHYKIHPTIISFLEKAMSHWSTKLKTLNNVITPHTPSISIRRGIFQGDAFSPLWFCLALNPLSNMLNESNAGFRIKINNNQTTLTHLMYMDDIKLYSKNIQTLNVLADATQIFSRDIQMNFGIDKCKTLTVTNGTIVHNDYTLDSGQIIESMDHNTSYKYLGIQQNQRINHKVIKKEILKKFQHRLNIVFRSQLNARNLTKALNTYAISLLTYSFGTIKWSQTELKNIQRNINTFLSNHRKHHPRSCIQRLTLPRTEGGRGIIDVTNLHNKQITSLRSFFFEQTLRSNLHEVITAADIRLTPLNLSERTPQPNEKLVNMSEKIATWENKSMHGRHYKDLQQPHVDKAASNEWLRRGELFPETEAFMLAIQDQTINTRNYQKHIIQNPNFLNDLCRRCHSNAETIQHITGACKAIVQSDYKHRHDQVAAIIHQNLAHKHNFIPNKIPYYKYIPNTILENNNFKIYWDRTIITDKTVHFNRPDITLLDKINRSVLIIDIAVCNTHNLLNTHTEKMAKYNELAIEIKRQWQVSTVKTVPIIISTTGIIPKTLLTSLNTLQMPPSTQSLLQKAAILNTCRITRKFLDL

SEQ ID NO: 32086 - protein, 1089 aa, Creonpyge creon
MKLIKHYYEITQYGMNKTAYRSQIRNKFLDSYPQLTHLSEQNISDQTRAIIQNKYLPEYRLKEIAKELQESRNIQTEECIAITDLDDNLNLNAEKPESNSTPTLNTANNNSEVTHKLISNKLYFDHKIIDKKFQEALDLFKNSHPTKRPHIPKQKTSKRLKAVVSYINNTLLSNLTTIDQDFTTTQTIIYSAAYTATVCSGIKIKDVINTPQTNKDKTPAWQKRIENKILLLRKEIGRMTQYVKGNRSRKLVKHIEIITNKYKIHSKHEEPNLSPEAILDTMKQKLNASASRLKRYITSNLRKKQNTQFIQNEKVFYRQLSSNTQNTVREFSNTTHKNSTENATPLQEDLQIFWSKIWANPVQHNESATWIKSENLIKINTMAYEHIPEETFLDVLKKAHNWKSPGSDNLHNFWYKKFTKIQPLLHKHINNFIGNPELIPQYIIQGITYLIPKDKNLTDPSKYIPITCQQTIYKILTGCISALVYKHVTLNNIVSEEQKGCRKGSQGCKEQLIIDSIVLNFAHTQKRNISLMYIDYQKAFDSVPHSWLIFILKYYKIHPTIITFLEKVMNQWSTKLKPYNSEFSPNTPSIPIRRGIFQGDSFSPFWFCLALNPLSHMLNNTKAGFSIKIGSTQTMLTHLMYMDDIKLFSNNTRSLHLLADATQKLSTDIQMNFGIDKCKTLTVKKGIIVHNDYTLESGHTIEALDHNTSYKYLGMQQNQKINHKHIKEDIIKKFQHRLNTIVRSQLNARNMIKALNTYAIPLLTYSFGIIRWSQTELKKVQCKINKILTTHRKHHPRSCVQRLTLPRAEGGRGIIDIVNLHNSQITSLRTYFFKRTEHSKLHRAITVADTGLTPLKLSDRTQQRNELLVSTSEKIAAWEKKSMHGRHRKDLQQPHIDKVASNTWLIRGDLFPETEAFMMAIQDQTINTRNYQKFIIRSPTLSTDLCRRCQSSSETIQHIIGACKSIVQTDYKHRHDQVAAIIHQNLAYRYTFLPHKTPYYNYKPSTVLENNRYKIYWDRTIITDKTVHCNRPDILLHDKNDKTVFIIDIAVCNTHNLLYAHAEKMAKYNELATEIKRQWQVSTVKTVPI

SEQ ID NO: 32087 - protein, 1345 aa, Urbanus proteus
MRLRSGYKLPQAGTGANRNGESRPEHSNSGSPTYSGGDTVSQSSAQCSTVADDNHDSASVVQTVNSSPISIPLSANVVQEALAISPVPIADTQSARKKWTTQMNKFIWRTYLIASNMETNTRHYLDVLHSEFNRQFPEMNCSKQRVGDQRRTIIRNKLLSHETLEKIRSEVRTHIQTHPNLLTQSYNNSQNTQRRRMKWSHEMNETLIRCYYEITECETNRTAYRSQLRNKFLDIYPQLSDLSEQHISDQTRSIIHNKYIPENRLQEIAKEIQNASRSHQHRNNYNVISDSNDDLHNTFNNDDSIVSHTNTLNNTSNPRNVNTLSRNLNSSMPHLNFTNIEKIFQETLDRFKESSPVNRPHIPKQKTCKRLASIVNHINTKILPRYISIDHDFITTQTIIYSAAYTAAVCNGTKIKETTTLHQNKQKIPTWQRRIENKIQLLRKEIGRMTQYIQGNRSRKLDRQVEGIKNKYIIHTKHEGPNITPDLILDTMKQKLNAFASRLKRYLTCTLRKTQNTQFIHNEKLFYRQLNLNTQTSQNNSSNTNKNNRNINTPTEDEMHQFWSNIWAGSGQHNASAKWIKSENLESITSMPYEYIPEQIFLRVLKKSHNWKSPGTDNLHNFWYKHFTETHTLLHKHINNFINNPESIPEFIMQGITYMIPKQKDSPDPSKYRPITCLQTIYKILTGCISDIVYQHITQNNILAEQQKGCRKGSQGCKEQLIIDTVVMNTAYTQKKNISIMYIDYQKAFDSVPHSWLIYILNHYKIHPTIISFLEKVMSHWSTKLKTLNNPITSHTPSIPIRRGIFQGDAFSPLWFCLALNPLSNMLNKAKAGFRIKINNSQTTLTHLMYMDDIKLYSNNIETLHILADTTQTFSRDIQMNFGVDKCKTLTVTNGKIVQNNYTLDSGQIIESMDHNTSYKYLGIQQNQRIDHKIIKKDIIKKFQHRLNVVLRSQLNARNLTKALNTYAISLLTYSFGTIRWSQTELRNIQRNINTFLTTHRKHHPRSCIQRLTLPRIEGGRGIIDVVNLHNKQITSLRSFFFEQTLRSNLHEVITAADTRLTPLNLSDRTPQPNEKLINMSSKISTWENKSMHGRHYKDLQQPHVDKAASNEWLRRGELFPETEAFMLAIQDQTINTRNYQKHIIQNPNFLNDLCRRCHSSSETIQHITGACKSIVQSDYKHRHDQVAAIVHRNLAHKHKFIPHKIPYYKYIPNTILENNNFKIYWDRTIITDKTVHFNRPDITLLDKLNRTVFIIDIAVCNTHNLVSTHTEKMAKYNDLAIEIKRQWQVSTVKTVPVIISTTGVIPKTLHTSLNTLQMPPSTQSLLQKAAILNTCRITRKFLDL

SEQ ID NO: 32088 - protein, 1347 aa, Telegonus cellus
MRLRSGNKLPQAGTEAKRNGESRPEQSCSGSPTYSGGDTVSQTSAQSSTVADHNHDSASVIETIHTRPSSILFLSANVVQEAQANNPVPIADPKCARKKWTTEMNQFIWRTYLIATKMETNTRHYLDILHSEFNRKFPHMNSSKQRIGDQRRIILRNKLLDQDTLEKIKSEADTYLQTHINLSTQSNDYNQNTQRRRMKWSNEMNETLIRCYYEITECESNNTAYRSQLRNKFLDIYPQLSDLSEQHISDQTRSIIHNKYIPENRLQVIAREIQDLRRSHEQQSNSNVTLSESNDDLQNTFNDEDSTVSHTNTQNVTRYFQNANRSHNFNSDTYLNYTNIEKTFQETLDRFKHSSQVNRPHIPKQKTCKRLGSIVHHINTNILPKYITMEQDFILTQTIIYSAAYTAAVCNGTKIQENANSLQQNRQNTPAWQKRIENKIQILRKEIGRMTQYIRGNRSRKLDKHIEEIKNKYIIHTKHEGPNVTPELILDTMKQKLNAFASRLKRYLICNLRKTQNTQFINNEKLFYRKLNLNTQTPQTDSPNTDNSNRNLNFTPNEEEMRQFWSKIWADSVEHNASAKWIKSENRESINPMSYEYIPEHIFLKVLKKCHNWKSPGTDKLHNFWYKQFTEIHTILHKHINNFVTNPESIPEYIFHGVTYLIPKQKDSTDPSKYRPITCLQTIYKILTGCISDIVYQHITQNNILAEQQKGCKKGSQGCKEQLIIDSVVMNTAHTQKKDISIMYVDYQKAFDSVPHSWLLYVLSHYKIHPTIVSFLEKAMSHWSTKLKTHDNYIEPHTPSIPIRRGIFQGDAFSPLWFCLALNPLSHMLNQAKAGFRIKVSKNQTTLTHLMYMDDIKLYSNNTNTLHVLADATQTFSTDIQMNFGVDKCKTLTIKNGITIHNNYILDSGQIIDSLDHNTSYKYLGIQQNQRINHNIIKKDIIKKFQHRLNIVFRSQLNARNLIKALNTYAIPLLTYSFGIIKWSQTELKNIQRKINTSLTTHRKHHPRSCVQRLTLPRVEGGRGIIEVVNLHNKQITSLRTFFFEQTLRSNLHKVITAADMRLTPLNLSDRTPQRNENLVSMSAKIATWENKSMHGRHYKDLQQPHVDKILSNEWLRRGELFPETEAFLIAIQDQTINTRNYQKYIIQNPNLLNDLCRRCQSSSETIQHITGACKSIVQSDYKHRHDQVAAIIHQNLAHKHNFITHKIPYYKYIPNTILENNNYKIYWDRTIITDKTVHFNRPDITLLDKTNKMVFIIDIAVCNTHNLVSTHTEKMAKYNELAIEIKRQWQVSTVKTVPIIISTTGIIPKTLQTSLNTLQMPRSTQTLLQKAAIFNTCRITRKFLDL

SEQ ID NO: 32089 - protein, 1351 aa, Grais stigmaticus
MKKTNKYNLRPRKACMDIERQRTAPLPDEEPGRAPVRFQPEHTTDFPTYVTSPVSSSSRTSSEILNSSLDSFEVSISRTSSTSTLSASVVQEADANELVPTAGSKCARKKWTTEMNQFIWRTYLIATNMETETRHYLDTLHTEFNRKFPEMISGKQRLGDQRRAIIRNKLLDQDTLDRIRSEVSEHINAHPNLHSQLTENNQDTQRKRLKWSREMNETLIKCYYEITKCETNRTAYRPQLRNKFLDRYPELSYLSEQHISDQTRSIISNKYLPDNRLKELAKEIQELISTQQTGESAEVALLDDLSNLNDVTTIANNPTPMLNITNVNSNLRNSETVTKLCLEPSTIDKKFQEVLDQFRSSNPINRPHIPKQKTSKSLMSIVSYINMNLLPKFVSTDLDFLETQNVIYCAAYTATVCNGVKIRENLISSQKTQDQTPAWQKRIENKILLLRREIGRMTQYTKGNRSRKLVKQVEIIKNKYKIHSKHEEPNLSPELILDTMKQKLNAAASRLKRYVACNLRRKQNIQFTNNEKLFYRQLSLNTQNTHSEMPRICNNQNNVPPQEELHRFWTKIWANSVEHNTSANWIESENLDEINSMSYEYVPVETFLDVLRKAHNWKSPGSDNLHNFWYKKFTKIQSLLHKHINNFIKNPETIPEYLMQGVTYLIPKDKDLTNPSKYRPITCLQTFYKIITGCITELVYKHITQNNLLAEEQKGCRKNSQGCKEQLIIDSVIMNLAYKRKRNISIMYIDYQKAFDSVPHTWLVHVLKHYKIHPIIVTFFEKAMHNWSTKLKVLDSELTTHISNIPIRRGIFQGDSFSPLWFCLALNPLSRMLNKAKAGFCVKINDKQTTLTHLMYMDDIKLYSNSTKTLHILADITQTFSKDIRMNFGIDKCKTLTVKKGTIIQNDYTLESGHIIEALDHNTSYKYLGIQQNKKINHKVIKKDIKNKFQHRLNVILRSQLNARNSVKALNTYAIPLLTYSFGTIRWSQTELKNVQAKINRTLTTHRKHHPRSCTQRLTLPRTEGGRGIIDVVNLHNKQIKNLRTFFFARAENSNLHQVITAADIGLTPLKLSDRTQQSDESLVNASDKILAWTNKSMHGRHRKDLEQPHVDKVASNTWLLRGELFPETEAFMIAIQDQIINTRNYQKFIIRSTSTPTDLCRRCQSSSETIQHITGACKSIVQTDYKHRHDQVAAIIHQNLALKHKFISHKIPYYKYKPNIILENNSHKIYWDRTIITDKTVHFNRPDILVYDKSNKTVLLIDIAVCNTHNLLSTHNEKLAKYNELAIEIKRQWQVSTVKTVPIIISTTGVIPKSLHTSLKTLTMPSSTHILLQKAVILNTCRITRKFLDL

SEQ ID NO: 32090 - protein, 1148 aa, Urbanus sp.
MKWSNEMNETLIRCYYEITECETNRTAYRSQLRNKFLDIYPQLSDLSEQHISDQTRSIINNKYIPESRLREIAKETQDSHQQLSNINETLSETNDDLHITFNNEDSADRRTSTQNVTHNFQRTNRSRNFNAYTPYLNHTNIEKIFQETLDQFKNSCPVNRPHIPKQKICKRLRSIVHYINTNILPKYISYEQDFMLTQSIIYSAAYTAAVCNGSKIQENANSLHQNRQNVPAWQKRIENKIQILRKEIGRMTQYVQGNRSRKLDKHIEIIKNKYITHTKHEGPNVTHELILDTMKQKLNAFASRLKRYLICNLRKTQNNQFINNEKLFYRQLNISTQKSQNYSSNTNNSNTNLILTPTEEDMRQFWSKIWADSVQHNASAEWIKSENLDSINPMCYECIPEHIFTKTLKKSHNWKSPGTDKIHNFWYKQFTEIHAILHKHINNFVTNPESTPEYIFQGVTYLLPKQKDSTDPSKYRPITCLQTLYKLLTGCISEIVYQHITHNNILAEQQKGCRKGSQGCKEQLIIDSVIMNTAHTKKKDISIMYIDYQKAFDSVPHSWLLYILQHYKIHPTIVSFLEKATSHWSTKLKTHDKHITPHTLSIPIRRGIFQGDAFSPLWFCLALNPLSHMLNQAKAGFRIKIDGNQTKLTHLMYMDDIKLYSNNTKTLHVLADATQTFSTDIRMNFGVDKCKTLNIKKGIILQNNYILDSGQTIDSLDHNTTYKYLGIQQNQRIDHKIIKKDILKKFQHRLNIVLRSQLNARNLVKALNTYAIPLLTYSFGIIKWTQTDLKNIQRNINTFLTTHRKHHPRSCIQRLTLPRIDGGRGIIDVINLHNKQITSLRTFFFEHTLTSDIHKVITAADTRLTPLNLADRATQRNEHLVSRSAKSATWENKSMHGRHYKDLQQPHVDKIASNEWLRRGELFPETEAFMIAIQDQTINTRNYQKHIIQNPNLSNDLCRRCHSSSETIQHITGACKSIVQTDYKHRHDQVAAIIHQNLAHKHNFIPHKIPYYKYTPNTILENNHHKIYWDRTIITDKTVHFNRPDITLLDKTNKTVFIIDIAVCNTHNLVSTHIEKIAKYNELAIEIKRQWQVNTVKTIPVIISTTGVIPKTLQASLNSLDMPQSTQTLLQKAAILNTCRLTRKFLDL

SEQ ID NO: 32091 - protein, 1355 aa, Cecropterus bathyllus
MRLRSGNKLPQAGTGANRNGESRPEQSHSGSPTYSGGDTVSQTSAQYDTAADHNHDPASVIETGNTRPTTIPSSSANVVREAQANNPVPIPDTKCARKKWTTEMNQFIWRTYLIATNMETNTRNYLDILHSEFNRKFPHMNSSKQRIGDQRRIILRNKLLDHDTLEKIKSEASIHIQTHSNLQTQSNDYSQNTQRRRMRWSNEMNETLIRCYYEITECETNRTAYRSQLRNKFLDIYPQYSDLSEQHISDQKRSIIHNKYIPENRLQQIAREIQNSSKSHAPLSNINVTTSEINDNLLNTSNNENSVDIQTNAQNITCNFQNESHSRNFNSSTLHSNFTNIDKIFHETLDRFKHSDPVNRPYIPKQKTCKRLSSIVNFMNTNILPKYISTEQDFISTQTIIYSAAYTAAICNGTKIKEIANSLHQNKQNIPAWQKRIENKIQLLRKEIGRMTQYVQGNRSRRLEKLIEDIKNKYIIHSKHEGPNITPELILDTMKQKLNVYASRLKRYLNCNLRKTQNYQFISNEKLFYRQLNLNTQKSQTVSPNNNDSNRNVNLTPTEENMRQFWSKIWADSVRHNESAAWIKSENLEYINPMSYEYIPEHIFLKVLKKSHNWKSPGTDNLHNFWYKQFTETHAILHKHINNFINNPELIPEYIMQGVTYLIPKQKDSTDPSKYRPITCLQTIYKILTGCISDIVYQHITQNNILAEQQKGCRKGSQGCKEQLIIDSVVINTAHTQKKDISIMYIDYQKAFDSVPHSWLIYTLHHYKIHPKIVTFLEKAMSHWSTKLKTHSNQITPHTCTATYTAPSIPIRRGIFQGDAFSPLWFCLALNPLSHLLNKTKAGFRIKINENQTKLTHLMYMDDIKLYSNNTKTLHVLADVTQMFSTDIQMNFGVDKCKTLTIKNGTIVHNDYTLDSGQIIQSLDHNTSYKYLGIQQNQRINHKDIKKDILKKFQHRLNIVLRSQLNARNLIKALNTYAIPLLTYSFGIIKWSQTELKNIQRNINTSLTTHRKHHPRSCIQRLTLPRTQGGRGITDVVNLHNKQITSLRAFFFEQSLRSNLHKVITAADIRQTPLNLCDRTPQRNEELVNMSAKTAIWENKSMHGRHYKDLHQPHVDKISSNEWLRRGELFPETEAFMIAIQDQTINTRNYQKYIIKNPNVLNDLCRRCQSGSETIQHIIGACKSIVQSDYKHRHDQVAAIIHQNLAHRHNFIPHKIPYYKYIPNTILENNNYKIYWDRTIITDKTVHFNRPDITLLDKVKKTVFIIDIAVCNTHNLVSTHTEKMAKYNELSLEIKRQWQVSTVKIVPIIISTTGIIPKTLHTSLNTLQMPPYTQTLLQKAAILNTCRITRKFLDL

SEQ ID NO: 32092 - protein, 1348 aa, Narcosius parisi
MRLRSGNKLPQAGTGANRDGESRPESSRSGCPTYSGGDTVSQTSAQYSTVADHHHDSASVIETVDTRPPSNPPSSVNVVREAQANNPIPIADPKCARKKWTTEMNQFIWRTYLIATNMETNTRQYLDVLHSEFNRKFPHMNASKQRVGDQRRIILRNKLLDHEILEKIKSEVKAYTQTTPNLQSQSNDHIQNTQRRRMKWSHEMNETLIRCYYDITECETNRTAYRSQLRNKFLNIYPQLSELSEQHISDQTRSIIHNKYIPENRLQEIAKEIQNSRRIHQQLSNINITTSENNDDLHKTCNNEDSEVNATNTQNITRSSRNTTRSSNLNSSMPHLNYTNIDKLFQETFDRFKDSNPVSRPHIPKQKNCKRLASIVNYINTKLLPKYTSIEQDFILTQTIIYSAAYTAAVCNGTKIKETANTLHQNRQNIPPWQKRIENRIQLLRKEIGRMTQYVQGNRSRKLDKHIEDIKNKYIIHSKHEGPNVTPELILDTMKQKLNALASRLKRYLICTVRKTQNNQFINNEKTFYRQLNLNSQNSRIDAPNTKNSNRNVNIPPTADEMRQFWSKIWASSVHHNASAKWIKSENLESIQPMFYEHIPEHTFLKVLKKSHNWKGPGTDNLHNFWYKQFTEIHTILHTHINNFINNPESIPEYIMHGVTYLIPKHKDTADPSNYRPITCLQTIYKLLTGCISDIVYQHITHNNILAEQQKGCRKGSQGCKEQLIIDAIIMNTAHTQKKDISIMYIDYQKAFDSVPHSWLVYILHRYKIHPIVISFLEKAMGHWSTQLKTHQTKITPHTPSIPIRRGIFQGDAFSPLWFCLALNPLSHMLNKTNSGFNIKINESQTTLTHLMYMDDIKLYSNSTETLHDLADATQKFSIDIKMNFGVDKCKTLTVKNGTIVQNDYTLDSGQIIESLDHNTSYKYLGIQQNQRINHKIIKKDILKKFQHRLNIVLRSQLNARNLSKAVNTYAISLLTYSFGTIKWSQTELKNIQRNINTSLTTHRKHHPRSCVQRLTLPRIEGGRGIIDVVNLHNKQITSLRRFFFEETLRSNLHKVITAADIRLTPLNLSDRTPQNNERLVNMSQKITTWENKSMHGRHYKDLQQSHIDKTASNEWLRRGELFPETEAFMMAIQDQTINTRNYQKYIIQNPNLLNDLCRRCKSSSETIQHITGACKSIVQSDYKHRHDQVASIIHQNLAHKHNFIPHKIPYYKYIPNTILENNNCKIYWDRTIITDKTVHFNRPDITLLDKVNKTVFIIDIAVCNTHNLLNTHSEKMVKYNELAIEIKRQWQVTTVKIVPIIISTTGIIPKTLHTSLATLQMPPSTHTLLQKATILNTCRITRKFLDL

SEQ ID NO: 32093 - protein, 1243 aa, Timochares trifasciata
MNEFIWRTYLIATNMETDTRHYLDILYKEFNRKFPTMNSSKQRLGDQRRTIIRNKLLDQTILDSIRAEVSKNINSDPNLHTQLLENFQDSQIKRLKWSQEMNETLIKHYYEITGCETNKTAYRSQLRNKFIETYPQLGHLSEQHISDQARAIISKKYLSESRLAELAKEIHNSQSTQQSMTNLSFTLPEENVIAPNSLEENVEVPTEISSQSFLNSSFGASRTSIYTQTYLDPLIIDKKFEEVLNLFKISNPTDRPPIPKQKTTKKLISIVGYINNNILPKHILIDLDFITTQTLIYSAAYTATVCNGIRIKDVTSNLPQIIKKIPEWQKRIEDKIILLRKEIGRMTQFLKGNPSRKLLKHIEIIRIKYKTHTKHEEPNLSPDMILDTMKQKLNAYASRLKRYTNCFLRRKQNLQFVNNEKLFYRQLAFNTERSHAEISTTLSNNRNESEEPSDEQLHRFWSDIWANPVQHNISAPWIKVESLDKIDPMTYDVIPEETFLNIIKKSHSWKSPGSDKLHNFWFKKFTKIQPLLYKHLNNFIKDPDTIPKYIMQGVTYLIPKENNPTNPSKYRPITCLQTIYKILTACISDLVYKHITQNDILAEEQKGCRKGSRGCKEQLIIDSVAMNFAQNHKRNISVMYIDYQKAFDSVPHSWLAYVLKHYKIHPTLITFLEKAMSNWSTKLKLLNREITSNNPCIPIRRGIFQGDSFSPLWFCLALNPLSHMLNNTKAGFIMRANGNKKILSHLMYMDDIKLYSNNTKTLHKLADTTQTFSMDIKMNFGIDKCKTLTVVKGKIIQNDYPLQLGQTITALDHNTSYKYLGFNQIQNINHKLTKQDIIKKFQHRVNIILRSQLNARNSIKALNTYAIPLLTYSFGVIKWSQSELKSVQCKINKALTTNRKHHPRSCVQRLTLPRIVGGRGIVDILNLHNRQITTLRNFFFEQSSHSNLHMVITAADVGITPLKLSDKSTQRNELIIKTSEKLAAWEKKTLHGRHFRDLKESHVDKKASNTWLLRGELFPETEAFMIAIQDQTINTRNYQKYIIRNPNLPTDLCRRCQSSSETIQHIIGACKSIVQTDYKHRHNQVAAIIHQNLAYRYKFLPFKIPYYKYKPSTILENNKYKIYWDRTIITDKTIHFNRPDILVVDKNNKTVFIIDIAVCNTHNLLSTHTEKMAKYNELAVEIKRQWQVNTVKTAPIIISTTGVIPKTLNTSLKILDMPTTTHILLQKAAILNTCRITRKFLDL

SEQ ID NO: 32094 - protein, 1345 aa, Urbanus evona
MRLRSGYKLPQAGTGANRNGESRPEHSNSGSPTYSGGDTVSQSSAQYSTVADDNHELTPVVQTVNSSPTSTPLSANVVQEALAISPVPIADTQSARKKWTTEMNQFIWRTYLIATNMETNTRHYLDVLHSEFNRQFPEMNCSKQRLGDQRRTIIRNKLLSHESLEKIKSEVRTQIQTHPNLHTQSNNIIQNTQRRRMKWSHEMNETLIRCYYEVTECETNRTAYRSQLRNKFLDIYPQLSDLSEQHISDQTRSIINNKYIPENRLQDIAKEIQNANRSHQQQNNFNVIPDSNDDLHNTFNNDDSIANHTNTQNITSNSRNANRPRNLNPSMPHLNFKNIEKIFQETFDRFKQSSPINRPHIPKQKTCKRLVSIVNHINTKILPRYISSEHDFITTQTIIYSAAYTAAICNGTNIKETANTFHQNKQNIPTWQRRIENKIQLLRKEIGRMTQYIQGNRSRKLDRQVEDIKNKYIIHTKHEGPNITPDLILDTMKQKLNAFASRLKRYLTCTLRKTQNIQFIHNEKLFYRQLNLHTQTSQNSSSNTNNNNKHINTPTGEDMHQFWSNIWASSGQHNASAKWIKSENLESITSMPYEYIPEQIFLKVLKKSHNWKSPGTDNLHNFWYKHFTEIHNILHKHINNFINNPESIPEFIMQGVTYMIPKQKDSPDPSKYRPITCLQTIYKILTGCISDIVYQHITQNNILAEQQKGCRKGSQGCKEQLIIDTVVMNTAYTQKKNISIMYIDYQKAFDSVPHSWLIYILNHYKIHPTIISFLEKVMNHWSTKLKTHNNPITPHTPSIPIRRGIFQGDAFSPLWFCLALNPLSNMLNKAKAGFRIKINNNQTTLTHLMYMDDIKLYSNNIQTLHKLADVTQTFSRDIQMNFGVDKCKTLTVRNGIIVQNDYTLDSGQIIESMDHNTSYKYLGIQQNQRIDHKVIKKDILKKFQHRLNVVLRSQLNARNLTKALNTYAISLLTYSFGTIRWSQTELINIQRNINTFLTTHRKHHPRSCVQRLTLPRIEGGRGIIDVVNLHNKQITSLRSFFFEQTLRSNLHEVITAADTRLTPLNLSDRTPQPNEKLVNMSSKIATWQNKSMHGRHYKDLQQPHVDKAASNEWLRRGELFPETEAFMLAIQDQIINTRNYQKHIIQNPNFLNDLCRRCHSSSETIQHITGACKSIVQSDYKHRHDQVAAIVHQNLAHKHKFISHKVPYYKYIPNTILENNNFKIYWDRTIITDKTVHFNRPDITILDKLNRTVFIIDIAVCNTHNLVSTHTEKMAKYNDLAVEIKRQWQVSTVKTVPVIISTTGVIPKTLHTSLHTLQMPPSTQSLLQKAAILNTCRITRKFLDL

SEQ ID NO: 32095 - protein, 1350 aa, Epargyreus clarus
MRLRSGNKLPQAGTGANRDGESRPEPSSSGSPTYSGGDTVSQTSAQYSTVADHNHDSVSVIETVNSRSSSTPPLSANVVQEAQANNPVPIADSKCVRKKWTTEMNQFIWRTYLIATNMETDTRHYLDKLHSEFNRKFPDMISSKQRLGDQRRTILRNKLLDHETLERIKSEVNTYIQTHSNLQTQSNNYSQNAQRRRMKWSHEMNETLIRCYYEITECETNKTAYRSQLRNKFLDIYPQFSDLSEQHISEQTRSIIHNKYIPENRLQDIVREIQNSRSHLNLQLSNGNESTADNNDDLSNTSNNENSIVTHTNRQNVTSCNIQNSNSSRNLISSRPHLNYTNIEKIFQETLDRFKYSSPVNRPHIPKQKTCKRLASIVNYINTSLLPKYISIDHDFMLFQTIIYAAAYTAAVCNGAKIKETANTLHQNRQNIPPWQKRIENKIQLLRKEIGRMTQHIRGNRSRKLDKHVEDIKNKYIIHSKHEGPNVTPDLILDTMKQKLNAFTSRLKRYLICNLRKTQNIQFINNEKVFYRQLNLNTQNSQVMSPNTNNSNRNINVSPTEEEMHQFWSKIWADSVQHNASAKWIKSENLESIHPMSYEHVPEDTFLKVVKKSHNWKSPGTDNLHNYWYKQFTSIHTILHKHINNFINNPELIPEYIMQGVTYLIPKDKDSADPSKYRPITCLQTIYKILTGCISDIVYQHVSQNNILAEQQKGCRKGSQGCKEQLIIDSVVMNTAYTLKKDISIMYIDYQKAFDSVPHSWLIYILDHYKIHPTIISFLEKAMNHWSTKLKTQNSLITSHTPSIPIRRGIFQGDAFSPLWFCLAINPLSHMLNQAKAGFRIKINNIQTTLTHLMYMDDIKLYSNKTKTLHVLADATQTFSADIQMNFGVDKCKTLTVTNGTLVHNDYILDSGQIIDSLDHNTSYKYLGILQNQRINHKLIKKDIIKKFQHRLNIVLRSQLNSRNLIKALNTYAIPLLTYSFGTIKWSQTELKNIQRNINTSLTTHRKHHPRSCVQRLTLPRAEGGRGIIDVVNLHNKQITTLRKFFFDHTLRSNLHKVITAADTGLTPLNLCDKTPQHNERLVNIPDKVAAWENKAMHGRHFKDLQQPHVDKAASNEWLRRGELFPETEAFMMAIQDQTINTRNYQKHIIKNPNLLNDLCRRCHSSSETIQHITGACKSIVQSDYKHRHNQVAAIIHQNLAHRHNFIPHKIAYYKYIPNTILENNNHKIYWDRTIITDKTVHFNRPDITLLDKMNKTVFIIDIAVCNTHNLLSTYTEKMAKYTELAIEIKRQWQVSTVKTIPIIISTTGVIPKTLDASLNILQMPPSTQSLLQKAAILNTCRITRKFLDL

SEQ ID NO: 32096 - protein, 1140 aa, Mysoria catomelaena
MNETLIKCYYEITTCGTNKTAYRSQIRNKFLDKYPQLYHLSVQNISDQTRSIIQNRYLPEYRLKEIAKKIKDNTHMQSENCIDITALDDNINSNTEIRESNPTPTVNIANGDSEARNRVNNNNLYLDHKFIDKKFQEALNLFKNSNPIERPHIPKQKTSKRLMAIVSYINNNLLPNCATFDQDFTTTQTIIYSAAYTATICSGTKIKHFSNIPQTTKDKTPAWLKRIENKILTLRKEIGRMTQYLKGNKSRKLINRIQIITNKYKIHSKHEEPNLSPETILDTMKQKLNASASRLKRYITSNLRKKQNRQFVQNEKVFYRQVSSNTQNTETEFTNTSLKNNSKNLNPQPLLEDLQLFWSKIWANPVQHNESATWINSENLGKINCMSYEYIPEETFLDVLKKSHNWKSPGSDNLHNFWYKKFTKIQPLLHKHINNFIQNPDLIPQYIMQGITYLIPKDDNLTDPSKYRPITCLQTIYKIITGCISVLVNKHITLNNIIAEEQKGCRKGSQGCKEQLIIDSVVLNFAHAQKRNINLMYIDYQKAFDSVPHSWLIFILKYYKIHPTIIIFLEKVMNQWSTKLKTFNNKFSPNTPCIPIRRGIFQGDSFSPLWFCLALNPLSDMLNSTKAGFSVKIGGKQTMLTHLMYMDDIKLYSNNTKSLHLLADITQTFSADIQMNFGIDKCKTITVKKGITIQNDYTLESGHIIEALDHNTSYKYLGVQQHQKINHKNIKEDILKKFRHRLNTILRSQLNARNMIKALNTYAIPLLTYSFGIIRWSQTELKRVQCKINKILTTHRKHHPRSCVQRLTLPRFEGGRGIIDVVNLHNSQITSLRNYFFERTEYSNLHKVITLADCGLTPLTLSDRTQQRNELVMSTSEKIAVWGKKALHGRHRKDLEQPHVDKMASNTWLLRGDLFPETEAFMIAIQDQTINTRNYQKYIIRNSTLASDLCRRCHSSSETIQHIIGACKSIVQTDYKHRHDQVAAIIHQNLAYRYTLIPHKTPYYNYKPSAVLENNRYKIYWDRTIITDKTVHCNRPDILLYDKNNKTVFIIDIAVCNTHNLLNAHAEKMAKYNELAIEIKRQWQVSSVKTVPIIISATGVIPKTLYASLEILTMPKTTSILLQKAAILNTCRITRKFLDL

SEQ ID NO: 32097 - protein, 1060 aa, Codatractus alcaeus
MKWSPEMNVTLIKCCYEITDCETNRTAFRSPLRIKFLDIYPQFSYLSEQHISDQLRSIINNKYIPENRLLEIANEIQNSSRSHQQLNINVAQLETEVDLHNTINNDDSAPSHTNTQNTTCSITNTNNYRNHNSSIPNIHLNHANIEEVFQETLNRFKFSSPVNRPYIPKQKACKKLSTIVNYINIELLPKYLSNDQDFTTTHTIIYTAAYTAAICNGTKINEITKTSHHNKQNIPAWQKRIEYKIQLLRKEIGRMTQYIQGNRSRKLNNQIENIKNKYKIHSKYEGPNATDELILDTMKQKLNAFASRLKRYLICNLRKKQNNLFINNEKLFYRQLNINTQKSQTNSPSNINDLDRNVNTTPAKGEMHQFWSKIWANPIQHNESAKWIKSENLDGINPMLYECIPEQVFLRVLKKSHNWKSPGTDNLHNFWYKHFTQIHTILHKHLNNFINNPETIPDFLMQGVTYLIPKDKISTDPSKYRPITCLQTIYKILTGCISDLVYQHITQNNILTEEQKGCRKGSLGCKEQLIIDSVVMNIAQTHKKNISVMYIDYQKAFDSIPHSWLIYILKHYKIHTTVITFLEKAMRHWTTKLKTHYNQITTHSPCIPIRRGIFQGDAFSPLWFCLALNPLSRMLNRTKAGFNIKINESQTTLTHLMYMDDIKLYSNNTKTLHVLADATQTFSTDIQMNFGVDKCKTLTVIKGKLIQNDYILDSGQIIESLDHNTSYKYLGIQQNQRINHKIIKKDILKKFQHRLNIIFRSQLYARNSVKAVNTYAIPILTYSFGTVKWSQTELRNIQRNINTSLTSHRKHHPKSCIQRLTLPRTEGGRGIIDVVNLHNKQITSLRTFFFNQIEKSNLHKVITAADTRLTPLNLSDRTSQHNEQLVNTSDKISIWENKAMHGRHYKDLQQPHVDKAASNEWLRRGELFPETEAFMMAIQDQTINTRNYQKYIIKNPNLLNDLCRRCHGSSETIQHITGACKSIVQSDYKYRHDQVAAIIHQNLAHKYKLIKQKVPYYKYIPNTILENNNYKIYWDRTIITDKTVHFNRPDILLLDKINKT

SEQ ID NO: 32098 - protein, 1242 aa, Urbanus proteus
MNQFIWRTYLIATNMETNTRHYLDILHSEFNRKFPHMNSSKQRIGDQRRIILRNKLLDHDTLEKIKSDANIYLQTHTNLPTQSNNYSQNTQRKRMKWSNEMNETLIRCYYEITECETNRTAYRSQLRNKFLDTYPQLSNLSEQNISDQTRSIIHNKYISENRLREIAKEIQDSHQQLSNINVTLSETNDYLQNTFNDENSADRHTSTQNVTHNFQSTNRSRNFNAHTPYLNHTNIEKIFQETLDRFKHSCPVNRPHIPKQKSCKRLRSIVHYINTNILPKYTSYEQDFMLTQSIIYSAAYTAAVCNGTKIQENANPLHQNRQNVPAWQKRIENKIQVLRKEIGRMTQHLRGNRSRKLDKHIEIIKNKYIIHTKHEGPNVTPELILDTMKQKLNAFASRLKRYLICNLRKTQNNQFINNEKLFYRQLNINTQKSQNHSSNTNNSNKNLILTPTEEEMRQFWSKIWADSVQHNASAEWIKAENLESIDPMYYECIPEHIFLKTLKKSHNWKSPGTDKIHNFWYKQFTEIHSILHKHINNFVTNPQSTPEYIFQGVTYLLPKQKDSSDPSKYRPITCLQTLYKLLTGCISEIVYEHITHNNILAEQQKGCKKGSQGCKEQLIIDSVIMNTAHAKKKDISIMYVDYQKAFDSVPHSWLLYILHHYKIHPTIVSFLEKAMSHWSTKLKTHGTYITQHTPSIPIRRGIFQGDAFSPLWFCLALNPLSHMLNQAKAGFRIKIDGNQTTLTHLMYMDDIKLYSNNTKTLHVLADATQKFSTDIQMNFGVDKCKTLTIKKGIVLQNNYILDSGQTIDSLDHNTTYKYLGIQQNQRIDHKSIKKDIVKKFQHRLNIVLRSQLNARNLIKAINTYAIPLLTYSFGIIKWTQTDLKNIQRNINTFLTTHRKHHPRSCIQRLTLPRTDGGRGIIDVINLHNKQITSLRTFFFEHTLRSNIHKVITAADTRLTPLNLADRTPQRNEHLVSRSEKSSAWENKSMHGRHYKDLQQPHVDKIASNEWLRRGELFPETEAFMIAIQDQTINTRNYQKHIIQNPNLLNDLCRRCHSSSETIQHITGACKSIVQTDYKHRHDQVAAIIHQNLAHKHNFIPHKIPYYKYTPNTILENNNHKIYWDRTIITDKTVHFNRPDITLLDKTNKTVFLIDIAVCNTHNLVSTHTEKIAKYNELAIEIKRQWQVNTVKTIPIIISTTGVIPKTLQTSLNSLDMPQFTQTLLQKAAILNTCRITRKFLDL

SEQ ID NO: 32099 - protein, 976 aa, Metardaris cosinga
MTIVSYINNNLLPNLATLDKDFTTTQTIIYSAAYTATICSGIKIKHFTNTPQTTKDKTPAWQKRIENKILILRKEIGRMTQYLKGNKSRKLINRIQIITNKYKIHSKHEEPNLSPETILDTMKQKLNASASRLKRYITSNLRKKQNTQFIQNEKVFYRQLSSNTQNTETDFTNTSRKNNSKNPQPLQEDLQMFWSKIWANPVRHNASATWINSENIEKINCMSYEYIPEETFLDVLKKSHNWKSPGSDNLHNFWYKKFTKIQPLLHKHINNFIRNPDLIPQYIMQGITYLIPKDDNLTDPSKYRPITCLQTIYKIITGCISVLVNKHITLNNIIAEEQKGCRKGSQGCNEQLIIDSVVLNFAHAQKRNINLMYIDYQKAFDSVPHSWLIFILKHYKIHPTIIIFLEKVMNQWSTKLKTFNNKFLPNTPCIPIRRGIFQGDSFSPLWFCLALNPLSHMLNSTKAGLSVKIGGKQTMLTHLMYMDDIKLYSNNTKSLHLLADITQTFSADIQMNFGIDKCKTITVKKGITIQNDYTLESGYIIEALDHNTSYKYLGVQQHQKINHKNIKEDILKKFRHRLNTILRSQLNARNMIKALNTYAIPLLTYSFGIIRWSQTELKRVQCKINKILTIHRKHHPRSCVQRLTLPRFEGGRGIIDVVNLHNSQITSLRNYFFERTEYSNLHKVITLADCGLTPLTLSDRTRQRNELVVSTSEKIAVWEKKALHGRHRKDLEQPHIDKMASNTWLLRGDLFPETEAFMIAIQDQTINTRNYQKYIIRNSTLATDLCRRCQSSSETIQHIIGACKSIVQTDYKHRHDQVAAIIHQNLAYRYTFIPHKTPYYNYKPSAVLENNRYKIYWDRTIITDKTVHCNRPDILLYDKNNKTVFIIDIAVCNTHNLLNTHAEKTAKYNELAIEIKRQWQVSTVKTVPIIISATGVIPKTLHASFEILKMPKTTSILLQKAAILNTCRITRKFLDL

SEQ ID NO: 32100 - protein, 1352 aa, Cecropterus albociliatus
MRLRSGNKLPQAGTGANRNGESRPEQSHSGSPTYSGGDSVSQTSAQYDTVADYNLDSPSVIETGNIRPTPIPSSSANVVREAQADKPVPIADTKCARKKWTTEMNQFIWRTYLITTNMETNTRNYLDILHSEFNRKFPHMNSSKQRIGDQRRIILRNKLLDHDTLERIRSEASIHIQNHSNLQTQSNDCSQNTQRRRMRWSNEMNETLIRCYYEITECETNRTAYRSQLKNKFLDIYPQYSDLSEQHISDQTRSIIHNKYIPEDRLQQIASEIQQNSSRPHQPLNTNINITTSDNNDNLLNTFNNENSVVSQTNAQNITSNFQNESQSRNFNNSFMLHSNHTNIEKTFQETLDRFRHSNPVNRPYIPKQKTCKRLRSIVNFINTHILPKYISIEQDFILTQTIIYSAAYTAAICNGTKIKEIAINSLYQNRQNVPAWQKRIENRIQLLRKDIGRMTQYVKGNRSRKLEKKIEGIKNKYKTHSKHEGPNITPELILDTMKQKLNVYASRLKRYLNCNLRKTQNNQFINNEKVFYRQLHLNTPESQTVSSITNEINRNVNLTPTDENMLQFWSKIWAAPVRHNESAKWIKSENMEHINPMSYEHIPEHILLKVLKKSHNWKSPGTDNIHNFWYKQFTETHIVLHKHINNFINNPELIPDYIMQGVTYLIPKQKDSTDPSKYRPITCLQTIYKILTGCISDLVYQHITQNNILAEEQKGCRKGSQGCKEQLIIDSVAINTAHTQKKDISIMYIDYQKAFDSVPHSWLIYILNHYKIHPTIVLFLEKAMGHWSTKLKTLNNQITPHTPSIPIRRGIFQGDAFSPLWFCLALNPLSNMLNKTKAGFRIKIHDNHTKLTHLMYMDDIKLYSNNTKTLHVLADVTQMFSTDIQMNFGVDKCKTLAIKNGTIVQNDYTLDSGQIIESLDHNTSYKYLGIQQNQIIHHKFIKKDILKKFQHRLNIVLRSQLNARNLIKALNTYTIPLLTYSFGIIKWSQTELKNIQRNINTSMTTHRKHHPRSCIQRLTLPRAEGGRGITDVVNLHNKQITSLRTFFFEQSLISNLHKVITAADIRLTPLNLCDRTPQRNEQLVSMSAKTVAWESKSMHGRHYKDLQQPHVDKIASNEWLRRGELFPETEAFMIAIQDQTINTRNYQKHIIQNRNILNDLCRRCQSASETIQHITGACKSIVQSDYKHRHDQVAAIIHQNLAHKHNFISQKIPYYKYVPNTILENNNYKIYWDRTIITDKTVHFNRPDITLLDKVNKTVFIIDIAVCNTHNLVSTHTEKIAKYNELSLEIKRQWQVSTVKVVPIIISTTGIIPKTLHTSLNTLQMPPYTQTLLQKAAILNTCRITRKFLDL

SEQ ID NO: 32101 - protein, 1367 aa, Mimoniades nurscia
MQKNYLNTYNLRPRSAACRKTSTDRKLYRSSSLLEEEPKSKHQQEYTTHPLAFFKSPISSSSSDDLSQIHNSSPHSFSNTISRSSSTVSLSAIVVQQANAVETAPTADNSRARRKKWTTEMNQFIWRTYLTATKMETDTRYYLDILYTEFNKKFPHMNATKQRLGDQRRTIIRNKLLDQETLDKIKSEVDTHINTYLTQSAMVTHTNNQIQSIEDFQDTRRKRLKWSQEMNETLIKCYYEITQCETNKTAYRSQIRNKFLYSYPQLSHLSVQNISDQTRAIIQNKYLPEYRLKEIAKESQESMHIQSHKCNDITALDDNTGSNTENRESNPTAIQNTADSNSEARNTSNNNKFYLDYKFIDKKFQEAIDLFKNSNPIERPHIPKQKASKRLMAVVSYINNNLLSNFATIDQDFTTTQTIIYSAAYTATICSGIKIKDFTNTTQTNKDKTPAWQKRIENKILLLRKEIGRMTQYIKGNKSRKLINHIEIITNKYKIHSKHEEPNLSPETILDTMKQKLNAFASRLKRYITSNLRKKQNKQFIQNEKVFYRELSSSTQNTEREFSNTYRKNNRENSEQLQEDLQMFWSQIWANPVQHNASATWLNSENQGKINSMSYEYIPEETFLDVLKKSHNWKSPGSDNLHNFWYKKFTKIQPLLHKHINNFIRCPESIPQYIMQGITYLIPKDKNLTDPSKYRPITCLQTIYKILTGCISVLVYKNITLNNIIAEEQKGCRKGSQGCKEQLIIDSVVLNFAHTHKRNISLMYIDYQKAFDSVPHSWLIFILKYYKIHPTIITFLEKIMNQWSTKLQTYNNKFSPSTPCIPIRRGIFQGDSFSPLWFCLALNPLSNILNTTKAGFSIKIGGTQTILTHLMYMDDIKLYSNDTKSLHLLADITQKFSTDIQMNFGIDKCKTLTVKKGITTHNDYTLESGHTIEALDHNTSYKYLGIQQHKKINHKHIKEDIIKKFQHRLNTILRSQLNARNMTKALNTYAIPLLTYSFGIIRWSQTELKRIQCKINKILTTHRKHHPRSCVQRLTLPRFEGGRGIIDVVNLHNRQITSLRNYFFERTEYSNLHKVITVADCGLTPLILSDRTPQRNELVMSSSEKIAAWEKKVMHGRHRKDLQQPHIDKVASNTWLLRGDLFPETEAFMLAIQDQTINTRNYQKYIIRNSSLATDLCRRCQSSSETIQHIIGACKSIVQTDYKHRHDQVASIIHQNLAYRYTFIKHKIPYYNYKPSAVLENSRYKIYWDRTIITDKTVHCNRPDILLHDKNNKTVFIIDIAVCNTHNLLNAHAEKIAKYNELATEIKRQWQVSTVKTVPIIISATGVIPKTLYASLEMLTMPKTTFILLQKATILNTCRITRKFLDL

SEQ ID NO: 32102 - protein, 1357 aa, Yanguna spatiosa
MKKTYFNTYNLRSRSGACRKSSTDSESYRTSSLFEEELNSKHQLEYTTHPLSFFKSSNSSSSSDKLSQIHDSSPHSLSNTISRSSSIPSLSAAVVQEADTVETAPTTDNTCARRKKWTTEMNQFIWRTYLIATKMETDTRHYLDILYTEFNKKFPIMNATKQRLGDQRRTIIRNKLLDQETLEKIKSEVNTHINTYPNNLTQPIEDLQSTRRKRLKWSQEMNETLIKCYYETTQCETNKTAYRSQIRNKFLDSYPQLSQISEQNISDQTRAIIKNKYLPEYRLKEIAKELEESRNVQTEECIDITALHDTVNLNEEKHESNPTPTLNTANNDSEARNKLTNNKSYLDDKYIDKKFQEALDLFKNSNPTERPIIPKQKTSKRLMAVVSYINNTLLSNFTTIDQDFTTTQTVIYSAAYTATICSGIKIKDLINTPETRKDTTPAWQKRIENKILLLRKEIGRMTQYIKGNRSRKIAKHIEIITNKYKIHSKHEEPNLSPETVLDTMKQKLNASASRLKRYITSNLRKKQNTQFIQNEKVFYRQLSSYTQNTKTELSKTSKINRVNGPSLQEELQLFWSKIWANPVQHNASATWIKLENIDKINSMSYEYIPEETFLDVLKKAHNWKSPGSDNLHNFWYKKFTKIHPLLHKHINNFIRSPELIPQYVMQGISYLIPKDKNLNDPSKYRPITCLQTIYKILTGCISALVYKHITLNNIIAEEQKGCRKGSQGCKEQLIIDSVVSNFAHIRKRNISLMYIDYQKAFDSVPHSWLIFILKHYKVHPTIITFLEKVMNQWSTKLKTFNSVFSPNTPCIPIRRGIFQGDSFSPLWFCLALNPLSHMLNNTKAGFVIKTGDSQTMLTHLMYMDDIKLFSNNTKSLHLLADVTQKFSTDIQMKFGIDKCKTLTVKKGIIIHNDYTLESGHTIEALDHNTFYKYLGIHQNKKINHKHIKADIIKKFQHRLNTIFRSQLNARNMIKALNTYAIPLLTYSFGIIRWSQTELKKIQCKINRTLTTHRKHHPRSCVQRLTLPRAEGGRGIIDVVNLHNSQITSLRTYFFERTVHSNLHKVITIVDNGLTPLKLSDRTRQSNELLASTSEKIAAWEKKSMHGRHRKDLQQPHIDKIASNTWLVRGDLFPETEAFMTAIQDQTINTRNYQKYIIRNSNLSTDLCRRCQSSSETIQHIIGACKSIVQTDYKHRHDQVAAIIHQNLAYRYTFIPHKTPYYNYKPSTVLENNSYKIYWDRTIITDKTVHCNRPDILLYDKNNKTVFIIDIAVCNTHNLQNAHIEKIAKYNELATEIKRQWQVSTVKSVPIIISATGIIPKTLHTSLEILKMPKTTVILMQKAAILNTCRLTRKFLDL

SEQ ID NO: 32103 - protein, 1220 aa, Pyrgus malvae
MNQFIWRTYLIATNMEKDTRNYLDILHREFNQYFPHMNASKQRLGDQRRTIIRNKYLDSDTLEKIKLEAINYIATHPDSQTQLDIVSQSTQRKRMKWSQEMNEILIKCYYEITNCETNRTAYRTQLRNRFLESYPQLSHLSEQHISDQTRSILSNKYLSENRLKELAEEAKESSNRQENMDCANLATTEESIDLRYNIVNEQEDTSNAQSTENIRNSYLENTNSFPHKEVNIDNRAIYKKFQEVLDLFRDSNPTNRPYIPKQKSSKKLALIVDFINKNLLPQHLSVDQDFITTQTIIYCAAYTATICNGMKIKEVEINSLKTSKNKVPAWQKRIESKILQFRKDIGRMTQFIKGNTSKKLIKHVDIIQNKYKSHSKHEEPNLSPDLILDTIKQKLNAYSSRLRRYTACSLRKKQNIQFSNSEKHFYRQLASNSQKTQPELGIPMNNNTSHTHNKGIEFAAPPEHELHSFWSGIWANPVEHNTSASWIKSENVDKINPMPYEYIPENTFLNILKKSHNWKSPGSDNLHNYWYKKFTRSHPHLHKHINNFIQNPESIPKYIMQGVTYLIPKDRDLTNPSQYRPITCLQTIYKLITGCIADLVHQHVRQNNILAEEQKGCRKGSQGCKEQLIIDAVAMNFAHLHKRNINIMYIDYQKAYDSVPHTWLIYILKHYKVHSAIVSFLEKTMSHWSTVLKTSNTEATTHTPPIPIQRGIFQGDAFSPLWFCLALNPLSHILNNSKAGFTITNQDNKLTLTHLMYMDDIKLYSNSTKTLHQLADITQTFSADIRMNFGIDKCKTLTVKKGTITQNDYTLKSGHIIEALDHNTTYKYFGIQQNQRVNHKIIKNDILKNFRHRLNTIFRTQLNARNTIKAVNTYAIPLLTYSFGIIRWSQSELKRVQCTINKTLTSYRKHHPRSCVQRLTLPRFEGGRGIIDVSNLHNKQISSLRKFFFERSSNSNLHKVIASVDARLTPLALKIKTTQRNEVIIGQKEKIESWEKKALHGRHRKDLLQMHVDKALSNAWLLRGQLFPETESFMMAIQDQTINTRNYQKHIIRNPSLQTDHCRRCQSSSETIQHIIGACKAIVQSDYKHRHDQVAAIIHQHLAHKHNFVSHKTPYYKYKPSTILENSTHKIYWDRTIITDKTVHFNRPDIMLWDKNKKCVFIIDIAVCNTHNLLNTHSEKMAKYNDLAIEIKRQWQVSTVKIVPIIISATGVTPKTLQTR

SEQ ID NO: 32104 - protein, 1016 aa, Chioides albofasciatus
MPHLDYTNMEKIFQETLDRFKHSNPVNRPHIPKQKTCKRLAAIVHYINTNILPKYTSIEHDFITTQTIIYSAAYTAAVYNGAKIKETTNTLHQNTQYVPPWQKRIENKIQLLRKEIARMTQHMKGNRSRKLDKHIEDIKNKYIIHSKHESPNVTPELILDTMKQKLNAFASRLRRYLICNLRKTQNTQFINNEKVFYRQLNLNTQNSQINSPNTNNSNRNVNLLPTEEEMHQFWSKIWADSVQHNASAKWIKSENLDSINPMSYEHIPEHTFLKVLKKSHNWKSPGTDNLHNFWYKQFTEIHTILHKHINNFINNPESIPEYIMQGVTYLIPKDKESADPSKYRPITCLQTIYKLLTGCLSDIVYQHVTQNNILAEQQKGCRKGSQGCKEQLIIDSVIMNTAYTQKKDISIMYIDYQKAFDSVPHSWLIYILNHYKIHPTIIYFLEKAMNHWSTKLKTPNNDITSHTPSIPIRRGIFQGDAFSPLWFCLALNPLSHMLNKAKAGFRIKINNIQTKLTHLMYMDDIKLYSNKTKTLHVLADATQTFSTDIRMNFGVDKCKTLTVKNGTIVQNDYILDSGQIIDSLDHNTSYKYLGIQQNQRINHKVIKKEIINKFQHRLNIILRSQLNARNLIKALNTFAIPLLTYSFGTIKWSQTELKNIQRKINTSLTTHRKHHPRSCIQRLTLPRAEGGRGIIDVVNLHNKQIASLRTFFFGQTLRSNLHKVITAADIGLTPLNLCDKTPQHNEKLLNMSNKIAAWQNKSMHGRHFKDLQQPHVDKAASNEWLRRGELFPETEAFMMAIQDQTINTRNYQKHIIKNPNLLNDLCRRCQSSSETIQHITGACKSIVQSDYKHRHDQIAAIIHQNLAHKHNFIPHKTPYYKYTPNTILENNNYKIYWDRTIITDKTVHFNRPDITLLDKINKTVFIIDIAVCNTHNLVSTHTEKMAKYNELAIEIKRQWQISTVKTVPIIISTTGVIPKTLHTSLNILQMPPFTLSLLQKAAILNTCRITRKFLDL

SEQ ID NO: 32105 - protein, 1343 aa, Astraptes talus
MRLRSGNKLPQAGTGANGNGESRPEQPNSGSPTYSGGDTVSQTSAQYSTVADHNHDLPSVVRTTNTRPSSVMPLSANVVQEALANNPVPIADTKSARKKWTTEMNQFIWRTYLIATNMETNTRHYLDMLHSEFNRQFPDMNCSKQRIGDQRRIILRNKLLDHETLEKIKSEVSTYIQTCPNLHTQSNDCSQNTQRRRMKWSHEMNETLIRCYYEITECETNRTAYRSQLRNKFLEIYPQLSDLSEQHISDQTRSIIHNKYISQHRLQEIAKETQNSSRIYQNLSNTHVTTLENNDDLYNTFNNEDSIVNRTNAQNIISHSRNAIRSRTFNLNYTNIDKIFEETYDRFKNSSPVNRPYIPKQKTCKRLISIVHYLNTNILPKYISIEQDFITTQTLIYSAAYTAALCNGTKIQEITDTPHQNRQNKPAWQKRIENKIQLLRKEIGRMTQYIRGNRSKKLDKHVEEIKNKYIIHSKHEGPNFTSDLILDTMKQKLNAFASRLKRYLMCNLRKTQNSQFISNEKLFYRQLNLNTQMSQIESINTNNSQININSTPTEEVLRLFWSKVWASSGQHNASAKWIKSENLENINPMSYEYIPEHIFLKVLKKTHNWKSPGTDQLHNFWYKQFTEIHTTLHKHINNFINNPESIPEYIMQGVTYLIPKQRDSTDPSKYRPITCLQTIYKILTGCISDIVYEHITQNNILAEQQKGCRKGSQGCKEQLIIDSVAMNTAYAKKKDISIMYIDYQKAFDSVPHSWLIYILNHYKIHPTIVSFLQQAMNQWSTKLKIHNKHITSHTPSIPIRRGIFQGDAFSPLWFCLALNPLSHMLNKAKAGFQIKIDKNQTTLTHLMYMDDIKLYSNSTKTLHVLADITQKFSTDIQMNFGIDKCKSLTVKNGILVQNDYTLDSGQVIESLDHNTSYKYLGLQQNQTINHKDIKKDILKKFQHRLNIVLRSQLNARNLVKALNTYAISLLTYSFGTIKWSQTELKNIQRNINTSLTTHRKHHPRSCVQRLTLPRVEGGRGITDVVNLHNKQITSLRSFFYEQTLRSNLHKVITAADIRLTPLNLSNRAPQPNEKLANMSAKLATWQTKSMHGRHYKDLHQPHVDKAASNEWLRRGELFPETESFMLAIQDQIINTRNYQKHIIQNPNLINDLCRRCHSSSETIQHITGACKSIVQSDYKHRHDQVAAIVHQNLAHKHNFISHKIPYYKYTPSTILENNNFKIYWDRTIITDKTVHFNRPDITLLDKKNRTVFIIDIAVCNTHNLVSTHTEKMAKYNELAIEIKRQWQINTVKTVPIILSTTGVIPKTLHTSLNILQMPPSTQSLLQKAAILNTCRITRKFLDL

SEQ ID NO: 32106 - protein, 1354 aa, Spioniades abbreviata
MKKTYFKQYNLRPRPGACPMACTENEPKSSSTVCNEGLHRPLIKHKPEHTTDSPSSYSLNSPSSSSSIGGPSEIINSSSHSSRSSSISTLSAIVVQEAHANKLAPNADKICARKKWTTEMNQFIWRTYLIATNMETDTRHYLDTLHAEFNRKFPDMNATKQRIGDQRRTIIRNKLLDLDTLETIKSDANTYIVMNPNPQIQLKENIQNTQRKRLKWSGEMNETLIKCYYEITQCETNKIAYRSQLHKKFIDNYPQFSYLSEQHISDQTRSILKNKYLSESKLKELAEEIKKSRIAPIIDDCLDVTSLDDIINLNAENNATNLSLTLNITDSTSQDINNLTQKSCLDFTIINKKFQEALDLFKNSNPIDRPHIPKQRISKRLMTIVDYINNKLLPNYIEMNQDFLRTQTIIYSAAYTATVCSGKKVKEILNTSQQVKNKTPMWQKRIENRILLLRKEIGRLTQYTKGNRNSRLIKNIEVIKNKYKIHSKHEEPNLSPELILDTMKQKLNAYASRLKRYTTCDLRKKQNIQFINNEKVFYRQLSSNTHTETANTSNNNINADVKPSEEDIHRFWSKIWETSVEHNATASWLKLEHLDQINPMCYEYVPEQIFLDVLKKAHNWKSPGSDNIHNFWYKRFTKIQPLLHKHINNFIKNPELIPEYVMQGITYLIPKDKELCNPSKYRPITCLQTIYKILTGCITDLVYKHVTQNNILAEEQKGCRKGSQGCKEQLIIDSVVMNFANKSKRNVSTMYIDYQKAFDSVPHTWLVYILQHYKIHPIIINFLETAMSQWCTKLKLLNRTASPQIPCISIRRGIFQGDSFSPLWFCLALNPLSKMLNEAKAGFCVKIDNKQTTLTHLMYMDDIKLYSNNTKTLHLLAEITQTFSTDIQMNFGIDKCKTLTVKKGTLIQNDYTLHSGHIIEALDHNTSYKYLGIQQNQKIDHKSIKMDIIRTFKHRINIILRSQLNARNTIKALNTYAIPLLTYSFGTIRWSQTELKNIQCNINKILTIHRKHHPRSCVQRLTLPRATGGRGIIDVVNLHNKQITNLRTFFFKRAECSNLHNVITMADTGLTPLKLSDKTQQRNELLVSISDKIAAWEKKSIHGRHRKDLEQPHVDGSASNAWLKSGYLFPETEGFIIAIQDQTINTRNYQKYIIRNPSLLSDLCRRCHSSSETIQHIIGACKSIVHTDYKHRHDQVASIIHQNLAHKHGFIPYKIPFYKYKPNTILENNAYKIYWDRTIITDKTVHFNRPDIVLFEKNNKTVFIIDIAVCNTHNLLSTHAEKMSKYNQLAIEIKRQWQVRTVKIVPIIISATGVIPKTLHTNLKILNMPTSTYILLQKAIIINTCRITRKFLDL

SEQ ID NO: 32107 - protein, 1347 aa, Venada nevada
MRLRSGFKLPQAGTGAKCNGESRPEYLCSGSPMYSGGDTVSQTSAQYNAVADPNNSSVPVVETVNTRPSLTLPLSANVVQEAQASNPGPTADTKCVRKKWTTEMNQFIWRTYLISTNMETNTHHYLDVLHNEFNSKFPHMNASKQRVGDQRRIISRNKLLDRETLEKIELEASTYIQTHPNLQSQSNDYSQHTQRKRMKWSQEMNEALIKCYYKITECETNRTAYRSQLRNKFLNIYPQLSYLSEQHISDQTRSIIHNKYIPENRLQEIAKEIQNSRRLHQQLSNTNVTQSEINVNLHNTIDNEHSIPSHTNTQNLTCNIGYINHSRNPNSSIPHINYTNIEKVFQETLSRFKSSNPVNRPHIPKQKSCKRLGTIVNYINTNLLPKYVSSDHHFTTTQTIIYSAAYTATVCNGTNIYETANTLHNKRQQYIPAWQKRIESKIQLLRKDIGRMTQYLKGNRSRKLHKHIETLRNKYIIHSKHEGPNVTPELILDTMKQKLNASASRLKRYLICNLRKKQNNQFINNEKLFYRQLYLNTQKSQTDPPNIDNSNRNVNLIPTEEEMHQYWSKIWASSVQHNASAEWIKSENLEVINPMSYECIPEYIFLKVLKKSHNWKSPGTDNLHNFWYKHFTQIHPILHKHINNFINCPESIPEYIMHGVTYLIPKDKLSTDPSKYRPITCLQTIYKILTGCISDLVNQHITQNNILAEEQKGCRKGSQGCKEQLIIDSVVMNIAHTQKKNISLMYVDYQKAFDSVPHSWLIYILKHYKIHTTIITFLEKAMSHWTTILKTRNEIAPHNARIPIRRGIFQGDAFSPLWFCLALNPLSHMLNSAKVGFHVKINRNQTTLTHLMYMDDIKLYSNNTKTLHILADATQTFSSDILMNFGVDKCKTLTVTKGTIVQNDYILDSGQIIESLDHNTSYKYLGIQQNQRINHKIIKKDILKKFQHRLNIILRSQLNARNSIKALNTYAIPILTYSFGTIKWSQTELKNIQRNINTSLTSHRKHHPRSCVQRLTLPRIEGGRGIIDVVNLHNKQISSLRTFFFDQTLKSNLHKVITAADTRLTPLNLSDRTPQHNEKLVNIASKIATWENKAMHGRHYKDLQQPHVDKVASNQWLRRGELFPETEAFMMAIQDQTINTRNYQKHIIQNPNMLNDLCRRCQSSSETIQHITGACKSIVQSDYKYRHDQVAAIIHQNLAHKYNFITQKIPYYKYIPSTILENTNYKIYWDRTIITDKTVHFNRPDIILLDKIKNTVFIIDIAVCNTHNLVNTHTEKMAKYNELAIEIKRQWQIGTVKTVPIIISTTGIIPKALHTSLNTLQMPPYTLSLLQKSAILNTCITRKSLDL

SEQ ID NO: 32108 - protein, 1344 aa, Gorgopas trochilus
MKKTNTYNLRSRAGAYRKTSTDTETGTASPGDMKKNCSPTSSSTASSSPFRFIPTPNSSPINSYEFTNSSSSSISYLSADVVQEADANNPVPTDGNVRARKKWTPEMNQFIWRTYLIATNMEKDTRNYLDTLHTQFNQKFPHMNASKQRLGDQRRTIIRNKYIDIDTLERIKVEANAYINTSHCHINKQLNENAPTTQRKRLKWSQEMNETLIKYYYDITECETNRTAYRTLLRNKFLDCYPELSHLSEQHISDQTRSIIANKYIPENRLKELAEEIQKSRREEHTADSVDVILSENNEESNPNFMPAQNTLCSLPNYRRTVNCSITTDATYLDHTLINNKFQEILDQFKHSDPISRPRIPKQKTSKRLASIVSYINNNVLPKHISDDQDFETTQTIIYSAAYTATICNGIKIKNILNTLQQVKDKTPEWQKRMEHKILLLRTDIGRMTQYIKGNKSRKLVKHVENIREKYKIHSKHEEPNSSLELSLDTMKQKLNVYASRLRRYVTCNLRKKQNTQFVNNEKLFYRELAQNTEQTHEINTNNTEVGNKDVTPSEEKLYNFWSKIWSNPVQHNSTAPWIESENVDNINSMSFEKIPERTFLDVLNKTHNWKSPGLDNLHNFWYKKFTRIQPLIYKHINNFMVKPETIPKYIMQGVTYLIPKDKSDLSNPSKYRPITCLQTIYKILTGCITDLVYKHIIQNNILAEEQKGCRKGSQGCKEQLIIDSVTMNLAYTHKRNISVMYVDYQKAFDSVPHSWLLYILKHYKIHPVITNFLEEAMGHWSTQLKIISTETQQTSCIPIRRGIFQGDSFSPLWFCLALNPLSYMLNSVKSGFSIKINNDQTNLTHLMYMDDIKLYSNNTKTLHILADTTQTFSTDIRMNFGIDKCKTLTVKKGKIIKNDYNLNTGHTIEALDHNTSYKYLGIHQIQKIDHKIIKQDILKKFRHRLNIILRTQLNARNLIKALNTYAIPLLTYSFGVVRWSQTELKNIQCNINRTLTANRKHHPRSCVQRLTLPRREGGRGIIDVVNLHNKQITSLRNFFFQQASNSNIHKVITAADIGLTPLKLSEKTQQRNEHLVTTLEKIAAWDKKSMHGRHCKDLHQPHIDKAASNTWLLRGELFPETEAFMIAIQDQTINTRNYQKHIIRNPTLPTDLCRRCHSNSETIQHIIGACKSIVQTDYKHRHDQVAAIIHQNLAYKYTFIPHKLPYYKYSPCTLLENNSYKIYWDRTIITDKTIHYNRPDILLFDKINKTVLIIDIAVCNTHNLLSTHAEKMSKYNELAMEIKRQWQVSTVKIVPVIISATGVIPNTLHTSLKTLSMPTSTVCLLQKAAILNTCRIARKFLDI

SEQ ID NO: 32109 - protein, 898 aa, Cephise aelius
MTQYIQGNRSKRLVKHVESIKKKYVIHAQHEGPNSTPELILDTIKQKLNASASRLKRYVTCNLRKKQNIQFINNEKLFYRQLNLNTRTSETDTPNIGNINTNGYIMPSQEETQQFWSKIWANPIEHNASAEWIKSENLESINPMPYEYISEHTFLKILKKSHNWKSPGTDNLHNYWYKKFTSIHSVLHKYINNFINNPETIPEYIMQGVTYLIPKDKNSADPSKYRPITCLQTIYKILTGCIADLVYQHVTQNDILAEEQKGCRKSSQGCKEQLIIDSVVMNIANSDKKNISVMYIDYQKAFDSVPHSWLIYILKHYKIHPTIISFLENAMVHWTTKLKTCTQPSLSTTCIPIRRGIFQGDAFSPLWFCLALNPLSHMLNKSKAGFCISVNEHKTTLTHLIYMDDIKLYSKSTKTLHVLADITQTFSSDIKMNFGVDKCKTLTVAKGKIVQNDYTLDSGETIEALDHNTSYKYLGIHQNQRINHKLIKKDIIKKFQYRLNVILRSQLNARNSVKALNTYAIPLLTYSFGIVKWSQTELKNIQRNINTTLTTYRKHHPRSCTQRLTLPRTEGGRGIIDVVNLHNKQITSLRSFFFVHALRSNLHKVITAADARLTPLNLCDRATQHNEELVSITDKIATWQKKSLHGRHYMDLQQPHVDRIASNEWLRRGELFPETEAFIMAIQDQTINTRNYQKHIIRNPNLLSDLCRRCQSSSETIQHITGACKSIVQSDYKHRHDQVAAIVHQNLAHKHNFITHKIPYYKYVPKTILENNNYKIYWDRTIITDKTVHFNRPDITFWDKTNKIVFIIDIAICNTHNLVNTHTEKITKYNDLAIEIKRQWQVRVVKIVPIIISTTGIIPKTLHTSLNTLQMPQSTLTLLQKSIILNTCRITRKFLDIT

SEQ ID NO: 32110 - protein, 1353 aa, Epargyreus clarus
MRLRSGNKLPQAGTGANRDGESRPEPSSSGSPTYSGGDTVSQTSAQYSTVADHNHDSASVIETVNSRSSSTPPLSANVVQEAQANNPVPIADSKCARKKWTTEMNQFIWRTYLIATNMETDTRHYLDKLHSEFNRKFPDMNSSKQRLGDQRRIILRNKLLDYETLERIKSEVNTYIQTHSNLQTQSNNYSQNTQRRRMKWSHEMNETLIRCYYEITECETNKTAYRSQLRNKFLDIYPQFSDLSEQHISDQTRSIIHNKYIPENRLQDIVREIQNSRSHLNLQLSNGNNGGTESTPDNNGDLSNTSNNENSVITHTNRQNVTSCSIQNPNSSRILILPRPHLNYTNIEKIFQETLDRFKHSSPVNRPHIPKQKTCKRLASIVNYINTNILPKYISIDHDFILFQTIIYTAAYTAAVCNGAKIKETANTLHQNRQNIPPWQKRIENKIQLLRKEIGRMTQHIRGNRSRKLDKHVEDIKNKYIIHSKHEGPNVTPDLILDTMKQKLNAFTSRLKRYLICNLRKTQNIQFINNEKVFYRQLNLNTQNSQVMSPNTNNSNRNINLSPTEEEMHQFWSKIWADSVQHNASAKWIKSENLESIHPMSYEYVPEDTFLKVVKKSHNWKSPGTDNLHNFWYKQFTSIHTILHKHINNFINNPELIPEYIMQGVTYLIPKDKDSADPSKYRPITCLQTIYKILTGCISDIVYQHVTQNNILAEQQKGCRKGSQGCKEQLIIDSVVMNTAYTLKKDISIMYIDYQKAFDSVPHSWLIYILDHYKIHPTIISFLEKAMNHWSTKLKTQNSHITSHTPSIPIRRGIFQGDAFSPLWFCLAINPLSHMLNQAKAGFRIKINNIQTTLTHLMYMDDIKLYSNKTKTLHVLADATQTFSTDIQMNFGVDKCKTLTVTNGTLVHNNYILDSGQIIDSLDHNTSYKYLGIQQNQRINHKLIKKDIIKKFQHRFNIVLRSQLNSRNLIKALNTYAIPLLTYSFGTIKWSQTELKNIQRNINTSLTTHRKHHPRSCVQRLTLPRAEGGRGIIDVVNLHNKQITTLRKFFFDHTLRSNLHKVITAADTGLTPLNLCDKTPQHNERLVNIPDKVAAWENKAMHGRHFKDLQQPHVDKAASNEWLRRGELFPETEAFMMAIQDQTINTRNYQKHIINPNMLNDLCRRCHSSSETIQHITGACKSIVQSDYKHRHNQVAAIIHQNLAHRHNFIPHKIAYYKYIPNTILENNNHKIYWDRTIITDKTVHFNRPDITLLDKMNKTVFIIDIAVCNTHNLLSTYTEKMAKYTELAIEIKRQWQVSTVKTIPIIISTTGVIPKTLDTSLNILQMPPSTQSLLQKAAILNTCRITRKFLDL

SEQ ID NO: 32111 - protein, 1235 aa, Heliopetes ericetorum
METDTRNYLEILHKEFNQNFPDMNASKQRLGDQRRAIIRKKYLDSDTLDKIKLEATNFIANNINFQTQINISSQNTHKKRLKWSPDMNETLIKCYYEITECETNRTAYRTQLRNQFIEKYPQLSHLSQQHISDQARSILSNKYISENRLNQLAKDAKESSSGRQNIDCVDLATPEKDIDFQNISVNEPAVTLNPQSTECVTNLENTNISPTTEVNLDNTAVEVKFQRALDLFKDSNPTNRPYIPKQKSSKKLATIVNYINKNILPQHISDEQDFITIQTIIYCAAYTATICNGIKIKEIETNSSKAPKDRIPAWQKRIEKKILQFRKEIGRMTQFIRGNTSKKLVKHIEIIKNKYKIHSKHEEPNLSADLILDTIKQKLNAYASRLKRYQACSLRKKQNLQFINNEKLFYRQLASKSQKNQPESGISSNNNTTHIANNRTETLVPRDDELHKFWSKIWANPVEHNTSATWIKCENIDKINPMPYEYIPENTFLNTLKKSHNWKSPGSDNLHNFWYKKFTRIHPHLHKHINRFIQNPEKIPKYIMEGVTYLIPKDGDVTNPSKYRPITCLQTIYKLITGCIADLVYQHVKQNNILAEEQKGCRKGSQGCKEQLIIDSVAMNFAHSRKKNISVMYIDYQKAFDSVPHTWLIYILKHYKIHSAIVCFLEKAMSHWSTVLKARNVETTSNSHAIPIKRGIFQGDAFSPLWFCLALNPLSRLLNNTKAGFSITAENTKLTLTHLMYMDDIKLYSCSTKTLHRLADITQTFSSDIHMNFGIDKCKTLTVKKGTITQNDYTLKSGQTIEALDHNTTYKYLGIQQNQRINHKIIKNDILKKFKHRLNIIFRSQLNARNTVKAVNTYAIPLLTYSFGIIRWSQTELKNTQCIINKTLTAYRKHHPRSCVQRLTLSRNEGGRGFIDVLNLHNKQITSLRNFFFECSSNSNLHKVIASVDHLTPLVLKNETPQRNETIICQAEKIEAWEKKAMHGRHRKDLQQAHVDKNLSNTWLLRGQLFPETEAFMMAIQDQTINTRNYQKYIIRNPSLQTDLCRRCQSSSETIQHIIGACKSIVQSDYKHRHDQVAAVIHQHLAYKYKFISQKTPYYKYTPNIILENSTHKIYWDRTIITDKTIHFNRPDILLWDKNKKSVFIIDIAVCNTHNLLNTHTEKIAKYNELAIEIKRQWQVSTVKTVPIIISATGVTPKTLQTSLKQLDIPVSIHTLIQKATILNTCRITRKFLDL

SEQ ID NO: 32112 - protein, 1365 aa, Timochares trifasciata
MKKVKTNRYNLRPRGGVCREESTDLEYSSIEMLHLNSQTVARSLQQYTVDLTNCPTSINSPSSCEAQNSSDLFETSNSRSSSNSVSSASVVQDANAIEPVSTADATCARKKWTPEMNKFIWRTYLIATNMETDTLHYLDTLHREFNKEFPSMNSSKQRLGDQRRTILRNKLLDQNTLDSIRSEVRACIDSNPSVQHELRENSQETQRKRIKWTKEMNEALIKCYYEVTECETKKTAYRPQLRNKFLDIYPQLSHLSEQHISDQTRAIISNKYLPEHRMKELANEIDVLRSTQETIVSIETTPENYSHLNLYETSYADGIFNETSNVIGENSVNDSLHCTQTNTENSTTDTNLLLNTEFIEERFQETLTCFKNFEPICRPHIPKQKTTKHLISIVNYINTNILPKYISTEQDFTTINTLIYSAAYTASICNGIKISETLDTNQHCKDKKPTWQIRIENKILLLRKNIGRMTQYIKGSRSRKLTTQVENLTYKYRMHSKHEEFNFSPELILDTKKQKLNVYASRLKRYKICNLRKKQNLQFINNEKLFYRQLSINNENINMESLNTDRGNRTEREAPLEEEIHRFWSNVWSTPVQHNSSAPWIKSENLDKINPMTFEGIPEQTFLHVLKKAHNWKSPGSDKIHNFWLKRFTKIHPLLYKHINSFIKNPETVPGYVMQGVTYMIPKEQSASNPSKYRPITCLQTTYKILTGCISEIVYKHLTQNNILAEEQKGCRKGSQGCKEQLIIDSVVMNFAHARKRNISTMYIDYQKAFDSVPHSWLVYILTHYKIHPTIVSFLKVVMSQWSTYLKMLNGEVEPRSPCISIRRGIFQGDSFSPLWFCLALNPLSHILNKTKAGFTIKINDKRTTLTHLMYMDDIKLYSNSIKTLHLLADTTQKFSQDIQMNFGIDKCKILTVKNGVITQNNYTLESGHTIEALDHNTSYKYLGIKQNYKIDHQTVKQDVIKKFQHRLNIILRSQLNARNSIKALNTYAIPLLTYSFGIIKWSQSELRNVQRKINKTLTTHRKHHPRSCVQRLTLPRTEGGRGIIDVINLHNKQIKSLRIFFFERSSTSILHEVITATDVGLTPLKLSDKTSQRNELITSVSEKLAAWEKKSLHGRHLKDLQQVHIDKKSSNTWLQRGELFPETVMMAIQDQTINTRNYQKYIIRNPNLPSDLCRRCQSSSETIQHIIGACKSIVQTDYKHRHDQVASIVHQNLAYKHKLIPTKTPYYKYKPSTVLENKRYKIYWDRTIITDKTVHFNRPDILMLDRDTNTVLIIDIAICNTHNLLNTHAEKMAKYNDLATEIKRQWQVRTVKIVPIVISTTGVIPKTLNSSLKILEMPTTTHILLQKAAILNTCRITRKFLDIT

SEQ ID NO: 32113 - protein, 1356 aa, Gesta gesta
MKKTNTIRYNLRPRREACREESKDFSIRETLADGQAAIRYSPEYAADLIRYPSPISSSSYRTQNSSPNSFETDSSPSSMSVSPASVVQEANANDPVPTAGVLRARKKWTSEMNEFIWRTYLIATNMETNTLHYLDTLYTEFNQKFPDMNVSKQRLGDQRRAIIRSKLLDQNTLDIIRSEVNTYIASQPSLQYKICESSQEPQRKRMKWSREMNETLVKCYYRITEGETNKTAYRRQLRHQFLDIYPQFSHLSEQHISDQTRAIISNKYLPQHRLEEIAKEIQETRSSQRTMVSIDTMSSEDNVNFCEDVNSEAGIEETLTKTQENVINSNSNIVNNSTNTHLLLDPDFIDKKFQEVLDSFKNTEPTSRPHIPKQKTTKKLISIVNYIDSNILPKYITPEQDFIKKQTLIYSAAYTATICNGIKIKEILGTLQQTKDKKPLWQRRIENKISALRKNIGRMTQYVNGNRGKKLITHIDKIKYIYRIHSKHEEPNSSADLILDTMKQKLNAYASRLKRYTTCNLRKKQNLLFINNEKLFYRQLALNNETTHVEKLNNSNNNKIVGEVPSEEEIHRFWSNIWGNPVQHNLSAPWIKSENVEKIDPMVFENVPEQTFSDVLKKAHNWKSPGSDKIHNFWFKYFTKVHSILYKHINSFIKNPETIPDYIMQGVNYLIPKDKDVTSPSKYRPITCLQTTYKILTGCISNLVYKHITQNNILAEEQKGCRKGSQGCKEQLIIESVVMNFAYTHKRNISTMYIDYQKAFDSVPHSWLVYILTHYKIHPALVSFLEVAMGQWSTKLKIFNSNVSPTPCIPIRRGIFQGDSFSPLWFCLALNPLSHMLNKAKAGFSIKANDKHTTLTHLMYMDDIKLYSSSVKTLHLLADTTQKFSSDIHMNFGIDKCKTLTVQKGCIMQNNYTLDSGHIIEALDHNTSYKYLGIKQNQKIDHKTIKKDLTKKFQHRLNIIIRSQLNARNSIKALNTYAIPLLTYSFGIIKWSQAEIRNVQCRINKTLTAHRKHHPRSCVQRLTLPRTEGGRGIIDIANLHNKQIKSLRCFFFEQSSNSNLHATITAADSGLTPLKLSDKTSQRNEVLIKVSEKLAAWEKKSLHGRHLKDLQQEHVDKKSSNTWLLRGELFPETEAFIMAIQDQTINTRNYQKYIIQNNNLLTDLCRRCRSSSETIQHIIGACKSIVQTDYKHRHDQVAAIIHQNLAYKYKLIPLKTPYYKYKPIQKLENERFKIYWDRTIITDKTVHFNRPDILLLDKERKTVLIIDIAVCNTHNLLNTHAEKMAKYNDLAIEIKRQWQISTVKTVPIVVSATGVIPKTLNTSLKTLELPTTTHILLQKAAILNTCQITRKFLDLT

SEQ ID NO: 32114 - protein, 1366 aa, Mysoria galgala
MQKTYLNTYNLRPRSGTCRKISTDSKSYKTSLLLEDRLKSNHQPENTTDPLLSYKSPNSSSSSNNLSQILNSLPQSFSNTTSRSSSVLSLPATVVQQADAVETAPIADNTCARRKKWSREMNQFIWRTYLIATKMETNTRYYLDILYTEFNKKFPNMNATKQRLGDQRRTIIRNKLLDQKTLDKIKSEVDTHLNTYITHSNTSTHTNNQTQPIEDFQDTRRKRLKWSQEMNETLIKCYYEITQCGTNKTAYRSQIRNKFLDKYPQLSHLSVQNISDQTRSIIQNKYLPECRLKEIVKELQDSRHIQSENFIDIKALDDNMNFNTEIHESNLTPTLNTTNGDSEAINKLNDKLYIDHKLIDKKFQEALNLFKNSNPIERPNIPKQKTSKRLMAVVSYINNNLLPNFVTLDQDFTTTQTIIYSAAYTATICSGIKIKHLTNTPQTNKDKTPEWQKRIENKILLLRKEIGRMTQYLKGNRSRKLINHIEIITNKYKIHSKHEGPNLSPETILDTMKQKLNASASRLKRYITSNLRKKQNTQFVQNERVFYRQLSSNTQNTERDFSNTFRKNNSKNPQLLQEDLQMFWTKIWANPVQHNASATWIDSENPGKINLMSYEYIPKETFLDVLKKSHNWKSPGSDNLHNFWYKKFTKIQPLLHKHINNFIRSPDLIPQYIMQGITYLIPKDKNLTDPSKYRPITCLQTIYKILTGCISVLVNKHITLNNIIAEEQKGCRKGSQGCKEQLIIDSVVLNYAHKQKRNINLMYIDYQKAFDSVPHSWLIFVLKYYKIHPTIITFLEKVMNQWSTKLKTFNNEFSPNTRCIPIRRGIFQGDSFSPLWFCLALNPLSHMLNSTKAGFSVKIGGNQTMLTHLMYMDDIKLYSNSTNSLHLLADITQTFSADIQMNFGIDKCKTITIRKGITIKNDYTLGSGHIIEALDQNASYKYLGIQQQQKINHKNIKEDITKKFNHRLNTILRSQLNARNMIKALNTYAIPLLTYSFGIIRWSQSELKRVQCKINKILTTHRKHHPRSCMQRLTLPRSEGGRGIIDIVNLHNSQITSLRNYFFQRTGYSNLHKVISLADCSSTPLTLSDKTRQHNELLVSTSDKITAWEKKALHGRHRKDLQQPHIDKVASNTWLLRGELFPETEAFMIAIQDQTINTRNYQKYIIRNSTLPTDLCRRCQSSSETIQHIIGACKSIVQTDYKHRHDQVAAIIHQNLAHRYTFIPHKIPYYNYKPSAVLENNRYKIYWDRTIITDKTVHCNRPDILLHDKNNKTVFIIDIAVCNTHNLLNAHAEKMAKYKELATEIKRQWQVSTVKTVPIIISATGVIPKTLHASLETLTMPKTTSILLQKAAILNTCRITRKFLDL

SEQ ID NO: 32115 - protein, 1383 aa, Nosphistia zonara
MPRRTFISLAILVALLWADYEMKKTYLNTYNLRPRSGACRKTSTDSKSYRTSSLHEEELESKHQAEYTIHPLSCYTSPNSSSSSEKLSQIHNSSPHSFSNTISRSSSPVSLSAIVVQEADAIETAPTADITRARRKKWTTEMNQFIWRTYLIATKMETDTRYYLDILYTEFNKKFPNMNATKQRLGDQRRTIIRNKLLDQETLNQIKSEVDTHINTQTETATHTNNQTQSIEDFQDTRRKRLKWSQEMNETLIKCYYEITQCGTNKTAYRSQIRNKFLDSYPQLFHLSVQNISDQTRAIIQNKYLPEYRLKEIAEEIQEFRHIQSDNCIDITSLDDNMNVNTEKRETNPTPSTAKSGSEARNRSNNNKLYLDYKFIDKKFQEALDLFKNSNPIERPHIPKQKTSKRLMAIVNYINNHLLSNYVTLDQDFITTQTIIYSAAYTATICSGIKIKYLTKTPQTNKDKTPAWQKRIENKILLLRKEIGRMTQYVRGNKSRKLINHVKVITNKYKIHSKHEEPNLSPETILDTMKQKLNASASRLKRYIASDLRKKQNTQFVQNEKVFYRQLSLNTQNTEREFSNTSRKNNSVNMESLQEDLQVFWSKIWANPVQHNASATWINSENLENINLMSYEYIPEETFLDVLKKSHNWKSPGSDNLHNFWYKKLTKVQPLLHKHINNFIRSPDSIPQYIMQGITYLIPKDKNLTDPSKYRPITCLQTIYKILTGCISVLVYKHITLNNIIAEEQKGCRKGSQGCKEQLIIDSVVLNYAHTQKRNISLMYIDYQKAFDSVPHSWLIFILIYYKIHPTIITFLEKVMNQWSTKLKIFNNEFSPNTPCIPIRRGIFQGDSFSPLWFCLALNPLSHMLNTTKAGFSIKIGGTQTMLTHLMYMDDIKLYSQNTKSLHLLADVTQKFSTDIQMNFGIDKCKTLTIKKGITIHNDYTLESGHTIEALDQNTSYKYLGILQHQKINHKHIKEDIIKKFQHRLNIILRSQLNARNTIKALNTYAIPLLTYSFGIIKWSQTELKRVQCKINKILTTHRKHHPRSCVQRLTLPRFEGGRGIIDVANLHNSQITSLRNYFFERTEYSNLHKVISAADCGLTPLTLSDRTRQRNELLVSTSEKIAAWEEKVMHGRHRKDLQQPHIDKVASNTWLLRGDLFPETEAFMIAIQDQTINTRNYQKYIIRNSTLATDLCRRCQSSSETIQHIIGACKSIVQTDYKHRHDQVAAIIHQNLAYRYTFIPHKTPYYNYKPSAVLENNKYKIYWDRTIITDKTVHCNRPDILLHDKNNKTVFIIDIAVCNTHNLLNAHAEKMAKYNELATEIKRQWQVSTVRTVPIIISATGVIPKTLHASLEILTMPKTTTILLQKAAILNTCRITRKFLDL

SEQ ID NO: 32116 - protein, 1209 aa, Muschampia musta
MIFLQNINCKRYFHNNNNNNQFIWRTYLIATNMETDTRNYLDMLHKEFNQKFPHMNASKQRLGDQRRTIARNKYIEEETLETIKLEANAYINTSHHNNNKQVEENSIKTQRKRLKWSQKMNETLIKCYYEVTKFETNKTAYRSQLRNKFLDSYPELSYLSEQHIADQTRSILNNKYISDNRLKELAEEVKNHEEVENTAVCDEITSNEDNISLSNTLAMTNYEEITPRSTLTQNTEINSTNYLQIHNPMTTSTYLDHTLIDNKFKEILDLFKNTDPTSRPRIPKQKTSKRLASIVSYINNNLLPKYISDDQEFYKTQTIIYSAAYTATICNGIKIKNIQGTLLQIKDKIPDWQKRTENKITLLRKDIGRMTQYIKGNRCRKLVKHVENIRVKYKIHSKHEEPNSSLDLILDTMKQKLNAYASRLRRYVTCHLRKQQNIQFVNNEKLFYRKLTEATEKTRERTPKNSYSINNNEKSAPSEEEFYNYWSNIWANPAQHDASATWIKSENLDNISSMPYEHIPEQVFLNVLNKTHNWKSPGSDNLHNFWYKKFTRIQPLLHRHINNFVKRPESIPEYVMHGVTYLIPKDKDLTNPSKYRPITCLQTIYKILTGCISNLVYKHILQNNILSEEQKGCRKGSQGCKEQLIIDSIAMNLAHNQRRNISIMYIDYQKAFDSVPHSWLLYVLKHYKIHPVIITFLQKAMKHWSTRLKIFSNEIALHTSFIPIRRGIFQGDAFSPLWFCLSLNPLSVMLNSVKAGFPIKINNDQTKLTHLMYMDDIKLYSNNTKTLHLLADATQTFSRDIQMNFGIDKCKTLTVYKGALIKNDYTLDTGHVIESLDHNTSYKYLGIQQTQRINHKHIKQDILRKFRHRLNIILRTQLNARNSVKALNTYAIPLLTYSFGIIRWSQTELKSIQCNINKTLTTHRKHHPRSCVQRLTLPRSEGGRGIIDIVNLHNKQITSLRNFFFQQASRSNLHKVITAADTGLTPLKLNEKTVQRNEHLVSMSEKIAAWDKKSMHGRHCKDLQQPHIDKLASNTWLLRGELFPETEAFMIAIQDQTINTRNYQKYIIRTPNLVTDSCRRCHSNSETIQHIIGACKSIVQTDYKHRHDQVAAIIHQNLAYKYNFIPQKTPYYKYTPSTLLENNSYKIYWDRTIITDKTVHFNRPDILLFDKINKTVLLIDIAVCNTHNLVSTHTKKIAKYNELASLELQ

SEQ ID NO: 32117 - protein, 936 aa, Muschampia gigas
MKIKNIQGTLPQIKDKIPKWQKRTENKIALLRKDIGRTTQYIKGNRGRKLVKHVENIRVKYKIHSKHEEPNSSLDLILDTMKQKLNAYASRLRRYLNCHLRKQQNIQFVNNEKLFYRKLTEATEKTCERTPKTSYSVNNNKNSIPSEEEFFTFWSNIWANPVQHDASATWIKSDNLDNISSMPYEHIPEQVFLNVLNKTHNWKSPGSDNLHNFWYKKFTRIQPLLHRHINNFVKRPESIPEYVMHGVTYLIPKDKDLTHPSKYRPITCLQTIYKILTGCISDLVYKHILQNNILSEEQKGCRKGSQGCKEQLIIDSIAMNLAYSQRRNINIMYVDYQKAFDSVPHSWLLYVLKHYKIHPIIITFLQEAMKHWSTRLKIISNEIALHSSCIPIQRGIFQGDAFSPLWFCLSLNPLSVMLNSVKAGFPIKINNDQTKLTHLMYMDDIKLYSNNTKTLHLLADTTQTFSRDIRMNFGIDKCKTLTVYKGAIIKNDYTLDTGHIIESLDHNTSYKYLGIQQTQRINHKFIKQDILKKFRHRLNITLRTQLNARNSVKAINTYAIPLLTYSFGIIRWSQTELKSIQCSINKTLTTHRKHHPRSCVQRLTLPRSEGGRGIIDIVNLHNKQITSLRNFFFQQASRSNLHKVITAADTGLTPLKLNEKTQQSNEHLVSTSEKIAAWEKKSMHGRHCKDLQQPHIDKLASNTWLLRGELFPETEAFMIAIQDQTINTRNYQKYIIRTPNLLTDLCRRCHSNSETIQHIIGACKSIVQTDYKHRHDQVAAIIHQNLAYKYNFIPQKTPYYKYIPSTLLENNSYKIYWDRTIITDKTVHFNRPDILLFDKINKTVLLIDIAVCNTHNLVNTHTEKIAKYNELATEIKRQWQVSMVKTIPIIISATGVIPKTLHTSLRTLSMPPSTLSLLQKAAILNTCRITRKFLDI

SEQ ID NO: 32118 - protein, 1356 aa, Achlyodes mithridates
MKKTYPNNKYNLRPRSRVCRKTSKYTELHITSPLPDEELNNEYHVDNEPEYTTRSSCFNIPSNSSPLSSSSGSLFQIHNVSPHSLASPTMSRSSSTSTLSTSVVQEATAYETVPSADNTCARKKWTSEMNQFIWRTYLIATNMERDTRHYLDILHTEFNRKYPQMNSSKQRLGDQRRTIIRNKLLDQYTLERIKSEVNIYLNSHPNSQTQPNPQESQRIRLKWSPEMNETLIKCYYEVTQCETNKTAYRSQLRNKFLDFYPQFSHLSGQHISDQTRSIISNKYLSEKRLKDLASEIQESGSSQQTESCDEVATLEDNFNSNTDNNSIPNPNTTNSNSESARNLTVTKLFFDPRIIDDKFHETLDVFKNTDPVNRPYIPKQKTSKRLISIVNYINNNILPKIATPDQDFTSTQTIIYCAAYTATVCSGTKIRDSMNRSQNKQDIMPAWQHRIENKILLLRKEIGRMTQFIQGNRSNRLVKHIEVIKNKYKIHSKHEEPNQSPDLILDTMKQKLNALASRLKRYVICNLRKKQNIQFTSNEKLFYRQLSTNTQNSKTETLSSKNGELSEENMHTFWSKIWANSEEHNTSAAWIGEENTDKVNPMTYESVTEETFMSVLRKTHNWKSPGSDNIHNFWYKKLTKIHPLLHKHINNFIKSPELIPEYIMHGVTYLIPKDKDLTNPSKYRPITCLQTIYKILTGCITDLVYNHITRNNILAEEQKGCRRGSQGCKEQLIIDSIVMNFAHKHKRNISIMYIDYQKAFDSVPHTWLLYILKHYKIHPTIVTFLEKAMSHWSTKLKIINNEHITQTPCIPIRRGIFQGDSFSPLWFCLALNPLSQLLHKAKAGFSIKMKNNQTTLTHLMYMDDIKLYSNNTKTLHQLADITQRFSTDIKMDFGIDKCKSLTVKKGIVLQNDYTLESGHIIEALDHNTSYKYLGIQQNQRIDYKIIKKDIINKFQHRLNIILRSQLNSRNSIKAINTYAIPLLTYSFGIIKWSQTELKHVQCKINRTLTIHRKHHPRSCVQRLTLPRIEGGRGITDILNLHNKQITALRTFFFNHAEYSNLHKVITETDIGLTPLKLNNKTEQRNEILINMSDKIELWERKSIHGRHRKDLLQPHIDSKASNAWLLRGELFPETEAFITAIQDQTINTRNYQKYIIRNPNLLTDQCRRCQSSSETIQHIIGACKSIVQTDYKYRHDQVAAIIHQNLAHKHSFIQQKNPYYKYKPSTILENNKYKIYWDRTIITDKTVHYNRPDILLFDKNNKTVYIIDIAVCNTHNLHNTHAEKMAKYNELAIEIKRQWQVSTVKTVPIILSATGVIPKSLHNSLKTLSMPESTYILLQKAAILNTCRITRKFLDL

SEQ ID NO: 32119 - protein, 856 aa, Muschampia plurimacula
MKQKLNAYASRLRRYVTCHLRKQQNIQFVNNEKLFYRKLTEATEKTRERTPKNSYSINNNEKSAPSEEEFYNYWSNIWANPAQHDASATWIKSENLDNISSMPYEHIPEQVFLNVLNKTHNWKSPGSDNLHNFWYKKFTRIQPLLHRHINNFVKRPESIPEYVMHGVTYLIPKDKDLTNPSKYRPITCLQTIYKILTGCISDLVYKHILQNNILSEEQKGCRKGSQGCKEQLIIDSIAMNLAHNQRRNISIMYVDYHKAFDSVPHSWLLYVLKHYKIHPIIITFLQKAMKHWSTRLKIISNEISLHTSCIPIRRGIFQGDAFSPLWFCLSLNPLSVILNSVKAGFPIKINNDQTKLTHLMYMDDIKLYSNNTKTLHLLADATQTFSRDIRMNFGIDKCKTLTVYKGALIKNDYTLDTGHVIESLDHNTSYKYLGIQQTQRINHKHIKQDILRKFRHRLNIILRTQLNARNSVKALNTYAIPLLTYSFGIIRWSQTELKSIQCNINKTLTTHRKHHPRSCVQRLTLPRSEGGRGIIDIVNLHNKQITSLRNFFFQQASRSNLHKVITAADTGLTPLKLNEKTVQRNEHLVSMSEKIAAWDKKSMHGRHCKDLQQPHIDKLASNTWLLRGELFPETEAFMIAIQDQTINTRNYQKYIIRTPNLVTDSCRRCHSNSETIQHIIGACKSIVQTDYKHRHDQVAAIIHQNLAYKYNFIPQKTPYYKYTPSTLLENNSYKIYWDRTIITDKTVHFNRPDILLFDKINKTVLLIDIAVCNTHNLVSTHTEKIAKYNELAMEIKRQWQVSMVKTVPIIISATGVIPKTLHTSLRTLSMPPSTLSLLQKAAILNTCRITRKFLDI

SEQ ID NO: 32120 - protein, 950 aa, Ephestia elutella
MSETQRTTCPHCPDSSRLFVAPRGLNVHINRVHRSQSQSQQILPVAVPEPQPGTSTQSQHASTNFDDLSHLKRNVRVLKRIPKGARHAAAGKLLEIIEQCLVSNSKGDWYKLLTFAYSALKVPNGDKQKSLTSKVKNNIFSHSFTNDIVIDEISNNKSRSMTRRKIIESKVYDGDLRGAVRILTSDLGLAPDNAETFNLLKSKHPEPSRSLILPPEPNNTCPMLVVESSDVMDAINSFQSGSAAGLDGIRPVHLKELTSPSAGDNGLRLLVSLTKLSNFLLKGLLNPEVCPYFYGASLCALAKKDGGVRPIAVGNTLRRLVAKIGCQAVRTNVSSLLQPHQLGFATPLGCEAAIHATRTFAMSKMNDDDVILKLDIKNAFNSVERDVVLAEIRESIPNLYPFLHQCYVSPSRLFFGTSSLCSKVGVQQGDPLGPLIFSLAIRKVISSLDSPLNIWYLDDGTIGGSFSVVEKDLREMISKFKELGLELNTEKCEIYSSASNPSIPNGLRSLLPGVKLLCKADFCLLGAPIFSEAVPSTILLKNNLLLKSEAMLKELPSHVALVLFRSCLSMPKLTYTLRTAPVWFFPGEVLTIDTTLKNMLESILNVSLDEGQWRQASLPIRHGGLGIRRVQDTGLPAFLASSHGVKELVTQILSLDGVEFPLPFVSEALAEWQLQCPGKEYPDQPAVQRKWDDVIVKTVVDGILSNSSGTELARVKAALTPESGAWLHALPSPQLGTLMDNDSLRIAAGLRIGCNICEQHQCVCGALVDAKGYHGLSCLRCAGRFPRHHALNDIIRRAMITANIPCILEPPGLSRSDGKRPDGLTLVPWHRGRYLLWDATCVSTFASSHLKDTVRKAGSAAENAAKLKHAKYSCLTPAYIFVPVAFETTGAWGSEAKTFLKELGRRIFERSNDRRSVSFLAQRLSLAIQRGNAASIMGTFGPGSTQGLIE

SEQ ID NO: 32121 - protein, 945 aa, Ephestia elutella
MSQQKSACPHCPDSSRLFVAPRGLSVHIGRVHKTQSNSQSSSAAVPSSSQVGAINHPNFDHISHLKGNVRILKRIPKGARYLAAGRLSDVIDQCIENNGRQEWYKLFTFAYSALRVPDSGDKRSLTTKVKENISLPSSDISGELSNTTKKNWSGSLRKSIENKVYDGDLRGAVRILTSDCGLAPNNASTLEALKSKHPVPSRPLSLPPEPDSSCPVLSVTNSEVLEVINSFASGSAAGLDGLRPDHLKELTSPAAGDNGVRLVDALTKLCNFLLGGLLNPEICPYLYGASLCALLKKDGGIRPIAVGNVVRRLVAKLGCRAVKNEMSSYLQPHQLGFGTALGCEAAIHATRTFSMMKMSDDDVIIKLDLKNAFNTVERDIILSEVRDRIPNLYPFLHQCYVPSSNLYFGSSSIPSQVGVQQGDPLGPLLFSLAINKIISSLESPLNIWYLDDGTIGGNHAVVKRDIGTLVAKLSEIGLELNGTKCELFALQPDSLHVNECLTLLPGLRVIDKCNFHLLGAPVFADAVPTLIKDKSEVILKSGLTLKELSAHVALKLFVSCLSMPRLTYTLRTAPVWLFPTDITNLDSTIKKVLETILNISLDESQWQQASLPVRHGGLGVRRVQDTGLPAFLASSHGVKSLVTRLLSQNGDEISLPYVEEALAEWRVRFPAQNIPDLPHVQRKWDDTLAKSIIDDMLRRSSDVDLARLKAALSPESGAWLHALPSPQIGTLMDDNSLRIAAALRIGCDICEPHRCVCGASVDSRGHHGLSCLKCAGRFPRHHALNDIIRRALVSANIPCILEPPGLSRTDGKRPDGLTLVPWQRGRCLLWDATCVSTFAASHLRDTVRSAGSAADSAARQKHAKYQFLKPAYIFVPVAFETTGVWGTEAKVFIRELGHRLSERLSDGGRSVSYLSQRISIAIQRGNAASIMGTFEPGTMRGGLLD

SEQ ID NO: 32122 - protein, 993 aa, Metardaris cosinga
MYSCDYPHCSRTFQSKTGRGVHQQRAHKDWYDTQQLAKFPNKKARWSEEELALMAKIEANLANEGTKFINQALVKKIDRTIDAIKGQRRTQKYKDLVRKYLDDLQRPISQIPQLADGGWANTSNSEVTMDQAPDNVQPGEIFLRAVETLLGEAKNNISKDLKALCGKLKATTSCELRLLLSRHIAKYQSNKRVARGRHLDVATENLSNRKKRRIMYQQTQILWSKNPARCIRRILGDIKESAQTPPKHIMIPFWTRIMTTQNSISPGASPPSVVHEDLWAPIRLDELKAGYPPVQTAPGNDGISSKALRAIDPVELTIILNLILMCDYPPESLLEARTILIPKKDNASDPGDFRPITVSSVLIRCLHKILARRLEETIVIDERQRAFRAVDGCSINTYLVDLALRYHRQKCRSLYMASIDISKAFDSITHNCLSDTLIQYGCPTPLVEYIMRVYKYSTTTLSCGDWSSDPIHPTIGVKQGDPLSPILFNMAIDRLITNLPEEQGARIGDFKINAAAFADDICFFASSKSGLQNLIDVAYVTLNSMGLRINAAKSHTIAIKTIPRVKKCAVDPAQKFTCGGYEMPALSRASEWKYLGVAFTPEGRQTGSSGDGIRNKLDTLTKAPLKPQQRLFALRTFVVPSAYHTLTLGDTTISYLRGIDATVRRYVRKWLNLPADSPSAYIHADYKDGGLSIPSVRWVIPELRKRRLEALTKISYHYGLLLALEMDKCDHRLNDHGTCLSNKEAIRKRWAVKLHASFDGAPLSGSDKVPQQHRWVVESTKFLQGKDFLNACKLRINALPSRSRCARGRSGNDRYCRAGCNAIETLNHIQQVCHRTHAFRLQRHNAISKYVSKKLQEQGLQVLEEPRIPSSAGIRKPDIVAFDESKAYVLDAQVINDQYDLGKAHNSKTAKYKAISQEIRELTGSKSVHFGSITLSWRGLWSEAALKDLLEWKIITTSDIKIMSTRVLVGGLSSYRNFLSTTATAVRYRKGVG

SEQ ID NO: 32123 - protein, 998 aa, Pyrrhopyge telassa
MPFICNYPECNRAFTTKTGCGVHQQRAHKDWYDEQQLKKFPSVKVRWQEEEIAQMAMAEANLTIKGTRYINQELVKVVDRTTDAIKGQRRTPRYKKLVLDYITLLQEPNYSPQLAAGGEAIIPLSKCGADEEEPIGAVPSNEPFVIQIEELVELKEAIINKELIYICQKLRTTKPGNLRLLLANYINKLKPISKNTRKINHGCYRHHPLSKKKQRRLEYMRTQKMWSANPNRCVRRLLDTNPTPLATTTIPKETMASYWSNIMTSFADTAPGYIEPPTIHEQLWAPIDADEVKRNYPPAQTAPGADGITCKAIKAIDPSELAIILNLTLLCDHPPTSMLQSRTILIPKKGDVTEPGHFRPITISSVLTRCLHKILAKRMEATIIVDERQRAFRAVDGCSINTYLVDLALRYHREKHKSLYMASIDISKAFDTITHNSLRDTMLHNGCPKPLINYIMQVYKHSTTVITYDGWSSDPIHPTIGVKQGDPLSPILFNLAIDRLVKNLPDYQGARIGDFKINAAAFADDLVFFASSAKGLQSLIDIAYNTLQSMGLNINAAKSHTIAIKTIPKAKKSAVDANVKFRCGNYFMPALSRTSQWRYLGVSFTPEGKQSSDPLKCIIEKIQLITKAPLKPQQRLFALRTFILPSAYHTLTLGETHVGYLRKIDANIRTTVRKWLNLPADCPIAYIHADYKDGGLNIPSLRWNIPELRKRRLEALTRISYLYGPLLFREIDKCEHRLKDHGVSYPNLEAIKKRWADKLHESHDGAPLLGSAKVPQQHRWIIEGNNFLRGSDFLNSCKLRINALPTRSRCARGRPDIDRYCRAGCNAIETLNHVQQVCHRTHTTRIKRHNAIAKYVAEKLRNKGLQVLEEPRIQQTTGVRKPDLVAFDNSKTYVIDAQVINDQFDRDRAHHAKVAKYKPLLKNIQELTKNTLVHFGSVTISWKGLWSPASLKQLLEWKVLGNSDIKILSARVLTGGLSNYWAFHTTTSIRAKPREGIG

SEQ ID NO: 32124 - protein, 1270 aa, Apodemia mormo
MTNGALVTFNNMKRQNRNSRLGPLPGGDRRGTSGAGAGRDSIRSVSGMQLNRRAAAGELENATADHSRNSDDALQSRVRPSTSAGTSESTTTSLHKDDLRRKWSFEEQKELMLCYFLAKSGGIGYINRLENLFKNRNSTNPKVDRFTGNTLATQARKIISSKILSTELLNLIKEQAEMVHSNSQAQDHIIINTNNTIQQEDQNFIHCTEATVITEQNLPELDRIELPENTPQNSQQNLEENVYVHEDTDPLIMQLLQSLAEVKVNSIENRKILPKAKLNKQFFENLNKINNYLPKLLRTQESLRDVNDVIYAAAETLILNNNQKPYTPKNITKSNSEPPWKIRIKKKIEDLRKELGRFVEIKNGISTSRMNKIKIKLYNKYNIFKDSDQDYIMEVIKQKIIALASRIKRYEDLNNRKRQNNIFNDNQHKFYSQLTETKIRPNDIPDKQALQTYWESILSCPVSYNNEANWIDVIKRTTKNIQANDFNDIDVNSIHIALKKTANWKTPGIDKVQNFYLKYLTNCHIYLANMYNKILKNELYLDDWFTTGRVILIPKNNHTVEPSNWRPIACLPTMYKLLTSILADRLYTHCERHGVIQPEQRGCRKKSKGCKDHLLLNKSILEDAHSNQKNLSMAWIDYSKAFDSISHEWLLRVLDLYKCPKTITTFLKTVMPQWRVYMTAQGKKQTVTTEHINVRRGIFQGDSLSPILFCLAINPLSNILNTYKEKGYKLKDNTRVNHLLYMDDLKLYSNNKHNLKILLDSVEIFTKDINMNFGFNKCNTLNLQAGKRKDFCGEGHVLLSGQEFQYLTENKQYKYLGINESGMMDHNELKQQMKKEYFRRVKSLTKSQLNSRNLFKAINVYAVPVLLYSFGVINYKIKDLYKLDVKTRKILSLNKVHQQNADIERLYLPINEGGRGLLNIETLYKTQIMKYYRYLKNHTDHLVKAIFNHDTKKDKYSICKDAQKYKSELKISTDEHFSDQELKKAVIKSFIENWQNKPLHGQFYNSVLLRENIDQIASFQWIKKIPISPLLEATIFAIQDQAVVTRQHERDIIKKSVDGKCRLCKIKDETVQHVISGCEKLAGTYYIKRHNNIVQYVFWSLARKHNLDVHDKWWKNTLEYPQVKENDEAKLMWEIPVQTDMTITNNRPDIIYINKTQNHTFLIDISTPSDYNVGPKEIEKLGKYHPLKIEISRLWNTKTTIVPIIIGATGIVAKSLDRYCKMLDVNFNIPILQKQTAMHTSIILGKVLGDNVFVVEESHTQLSSFEPSTR

SEQ ID NO: 32125 - protein, 1267 aa, Apodemia mormo
MTNGALVTFYNMKRQNENCRLGPLPGGDRRGTSGADAGRDSIRSVSGVQLSRRAATGELENTTADHIRNADAALQSRDMPTISAGTSEPTTISSHQNENDYRRKWSSEELKELMFCYFLAKSEGIGYIKRLENLFKSRNSNNPKIHRFTGNTLATQARKIISGKMLSTELLNCIKEQAEQIGNSSQTQQHVILATHNNIQIAQENLISRHCTETSIIIEQHSPGLQMPPVSESTQRHVQQNLVHDINVQEDMDSLTMHLLQNLAEVKATPIENRKILPKAKLNKQFFDNLNKINNYLPKLLHLQESLRDLNDVIYAAAITLILFNKQKPYTPKSTTEDETEPPWKIRIKKKIEDFRKELGRLVEIKNGIVTNRMNKIKIKLYNKYKIFNDSDRDYIMEIIRQKIKALAGRLKRYEDLNKRKRQNKIFNENQRKFYSQLTETKISPIDVPDKQILHNYWESIISSPVSFNKAASWIKTIEKTTKNIQTKDFKEIDVDSIQVALTKAANWKTPGIDKVQNFYLKYFTNCHTYLANTYNQILKNEVYLDEWFTTGRVILIPKNNHTTEPSNWRPIACLPTMYKLLTSILADRLYEHCESHGIIQPEQRGCRKKSRGCKDHLMLNKSILEDAHINQKNLSIAWIDYSKAFDSISHEWLLKVLDLYKCPNIIKHFLQLVMPKWRVYMTAQGTKQRVTTEHMNVRRGIFQGDSLSPILFCLAINPLSYILKSYEVKGYKLKDSIRVNHLVYMDDLKLYSNNKHNLKILLDSVEIFTRDINMYFGLNKCNILNIQSGKRKDCIGEGHILLSGEEFKYLKQNKRYKYLGIDESGMIDHNELKQQMSREYFRRVKSLTNSHLNSRNLFKAINTYAVPVLLYSFGVLNYKIKDLYKLDVKTRKLLSLNKVHLQKADIDRLYLPINEGGRGLVNIEILYKTQMIKYYRYLKNHNDHLVKAVWKHDIKKDKYSISKDAQKYMLDLKISAEEHYSDQSIRKAVIKSGIERWQSKPLHGQFYNSVLLRENIEKLTSFQWLKKLPISPTLEATIFAIQDQAIVTRQHERDIFKKSVDGKCRLCKVKDETVQHVISGCEKLARSYYIKRHNNIVQYVFWSLAKKHNLDVHDPWWKNRLEYPQVKENDEAKLMWEMPIQTDMTISNNRPDIIYINKVQKHTCLIDISIPSDYNVGPKEIEKLSKYQSLKIEVSRLWSTKTTIVPIIIGATGIVAKSLERYCKMLDASINITTMQKQTAMHTSVIICKVLGDNVFIVDDAETPCP

SEQ ID NO: 32126 - protein, 1256 aa, Apodemia duryi
MKRQNENCRLGPLPGGYRRGTSGADAGRDSIRSVSGVQLSRRAATGELENTTADHIRNADAALQSRDMPTISAGTSEPTTISSHQNENDYRRKWSSEELKELMFCYFLAKSEGIGYIKRLENLYKSRNSNNPKIHRFTGNTLATQARKIISGKMLSTELLNCIKEQAEQIGNSSQTQHHEILATHNNIQIAQENLISRHCTETPIIIEQHSPGLQMPPVSESTQRHVQQNLVHDINVQEDMDSLTMHLLQNLAEVKATPIENRKILPKAKLNKQFFDNLNKINNYLPKLLHLQESLRDLNDVIYAAAITLILFNKQKPYTPKGTTEDETEPPWKIRIKKKIEDFRKELGRLVEIKNGIVTNRMNKIKIKLYNKYKIFNDSDRDYIMEIIRQKIKALAGRLKRYEDLNKRKRQNKIFNENQRKFYSQLTETKISPIDVPDKQILHNYWESIISSPVSFNKEASWIKTIEKTTKNIQTKDFKEIDVDSIQVALTKAANWKTPGIDKVQNFYLKYFTNCHTYLANTYNQILKNEVYLDEWFTTGRVILIPKNNHTTEPSNWRPIACLPTMYKLLTSILADRLYEHCESHGIIQPEQRGCRKKSRGCKDHLMLNKSILEDAHINQKNLSIAWIDYSKAFDSISHEWLLKVLDLYKCPNIIKHFLRLVMPKWRVYMTAQGTKQRVTTEHMNVRRGIFQGDSLSPILFCLAINPLSYILKSYEVKGYKLKDSIRVNHLVYMDDLKLYSNNKHNLKILLDSVEIFTRDINMYFGLNKCNILNIQSGKRKECIGEGHILLSGEEFKYLKQNKRYKYLGIDESGMIDHNELKQQMSREYFRRVKSLTNSHLNSRNLFKAINTYAVPVLLYSFGVLNYKIKDLYKLDVKTRKLLSLNKVHLQKADIDRLYLPINEGGRGLVNIEILYKTQMIKYYRYLKNHNDHLVKAVWNHDIKKDKYSISKDVQKYMLDLKISAEEHYSDQSIRKAVIKSGIERWQSKPLHGQFYNSVLLRENIEKLTSFQWLKKLPISPTLEATIFAIQDQAIVTRQHERDIFKKSVDGKCRLCKVKDETVQHVISGCEKLARSYYIKRHNNIVQYVFWSLAKKHNLDVHDPWWKNRLEYPQVKENDEAKLMWEMPIQTDMTIFNNRPDIIYINKVQKHTCLIDISIPSDYNVGPKEIEKLSKYQSLKIEVSRLWSTKTTIVPIIIGATGIVAKSLERYCKMLDASINITTMQKQTAMHTSVIICKVLGDNVFIVDDAETPCP

SEQ ID NO: 32127 - protein, 1260 aa, Apodemia duryi
MTNGALVTFNNMKRQNRNSRLGPLPGGDRRGTSGAGAGRDSIRSVSGMQLNRRAAAGELENATADHSRNSDDALQSRVRPSTSAGTSESTTTSLHKDDLRRKWSFEEQKELMLCYFLAKSGGIGYINRLENLFKNRNSTNPKVDRFTGNTLATQARKIISSKILSTELLSLIKEKAEMVHSNSQAQDNIIINTNNTIQQEDQNFIHCTETTVITEQNLPELDRIELPENTPQNSQQNLEENVYVHEDTDPLIMQLLQSLAEVKINSIENRKILPKAKLNKQFFENLNKINNYLPKLLRTQESLRDVNDVIYAAAETLILNNNQKPYTPKNITKSNSEPPWKIRIKKKIEDLRKELGRFVEIKNGISTSRMNKIKIKLYNKYNIFKDSDQDYIMEIIKQKIIALANRIKRYEDLNNRKRQNNIFNDNQHKFYSQLTETKIRPNDIPDKQALQTYWESILSCPVSYNNEASWIDVIKRTTKNIQANDFYDIDVNSIHIALKKTANWKTPGIDKVQNFYLKYLTNCHIYLANMYNKILKNELYLDDWFTTGRVILIPKNNHTVEPSNWRPIACLPTMYKLLTSILADRLYTHCERHGVIQPEQRGCRKKSKGCKDHLLLNKSILEDAHSNQKNLSMAWIDYSKAFDSISHEWLLRVLDLYKCPKTITTFLKTVMPQWRVYMTAQGKKQTVTTEHINVRRGIFQGDSLSPILFCLAINPLSNILNTYKEKGYKLKDNTRVNHLLYMDDLKLYSNNKHNLKILLDSVEIFTKDINMNFGFNKCNTLNLQAGKRKDFCGEGHVLLSGQEFQYLTENRQYKYLGINESGMMDHNELKQQMKKEYFRRIKSLTKSQLNSRNLFKAINVYAVPVLLYSFGVINYKIKDLYKLDVKTRKILSLNKVHQQNADIERLYLPINEGGRGLLNIETLYKTQIIKYYRYLKNHTDHLVKAIFNHDTKKDKYSICKDAQKYKSELKISTDEHFSDQELKKAVIKSFIENWQNKPLHGQFYNSVLLRENIDQIASFQWIKKIPISPLLEATIFAIQDQAVVTRQHERDIIKKSVDGKCRLCKIKDETVQHVISGCEKLAGTYYIKRHNNIVQYVFWSLARKHNLDVHDKWWKNTLEYPQVKENDEAKLMWEIPVQTDMTITNNRPDIIYINKTQNHTFLIDISTPSDYNVGPKEIEKLGKYHPLKIEISRLWNTKTTIVPIIIGATGIVAKSLDRYCKMLDVNFNIPILQKQTAMHTSIILGKVLGDNVFVVEESHT

SEQ ID NO: 32128 - protein, 991 aa, Ophraella communa
MERARLEYSGTDSTKRPFLPKLHSSRKLTITTKIVNEKIIPQFLNEKMGLEELHTVIYCGALTITRVMGRKVVARSENTPKPNYRKPGWMMRLEKRIEKIRAVLNRLLGYKKGNRSRRLKKHVNNIMNEYNIHAKHNKNNNSIQETTDTIKQKLAALNKRLKRYRETTLRKTQNNQFTRNEKYFYDNFKTSTNKRGNGIPTKEEIENYWKTVWSNEVHHNDTADWIKKEGTANQNIPIMKHEEITTGELGNIIQKTHNWKATGIVNVHNYYYKYFTCTHSHLARTLNNIINQPNTIPEFMTIGITYLKAKDNDMKNPSKYRPITCLSTIYKIFTSIIANRLYNHCDENKILAMEQKGCIKRSKGCKEQLIIDMVATEQIIKQRKNLHTSYIDFKKAYDSVPHSWLLRILDIYKVHPIIKNLLKSTMGKWQTKIILNNETGKIETQYITINRGIFQGDALSPLWFCLALNPLSNLLRNTKTGIQIKYEKNVEYILSHLLYMDDIKLYGTTETQLKHLIELTHNFSNDIKMEFGVDKCKTQTIRKGEQIVLRLEGEQLPDIEPMDEEEMYKYLGMHQKKNTEHKVMKEKMREKYFQRVNMFLKSKLNGKNLIKAINTYAVPLLTYTFGILKWTQTEIKDIQTKTHVAMTKHRVHHPKASIERMTLKRKDGGRGLIDILNLHNKSIIKLREYFYSKQPESQYYTAIVKADKYTPLTLSDEHKTLKIVDDAEKLTRWREKALHGRFPHEAGQDTVDKIASYNWLIHGELQPETEGFFVAIQDQVIKTKNYRKYIIKDGVDSDLCRKCKKGSETIQHIIGGCQALAQTDYKLRHDQMGKIIHQELALKYKLLNKKVNYYQYEPSTILENDEYEIYWDRTIFTDKKIEHNRPDIVVKNKKDKEVLLIDFAVTNNNNLEQTYSEKISKYIDLCFEIKDMWRYKKVRVIPIAISNMGLIPKKLLKTLEELDIKSYHVQLMQKSVKLNTCRTTRRFSYTK

SEQ ID NO: 32129 - protein, 1232 aa, Ophraella communa
MRGASGTHPRNAAPTRLLAPNLEQVIDEDSSIFECQERGGRMQSVSALPANITESTCDPLILPSSNTASQLNEAVLPRPLTNPNRRTKWTDEMNRFIVHAYYLVTKLERSKPGFRKRLHSKFIEKFPTFNFTEQNVAGQLRVILKNKYIPDPIIQKIKDTVEQELNSEPYQPQHSLDEEIISEIENDTKTKEVHNITSGKMIIQETHIQTENIENTRDTNEENRLNNVEEVDEYTEEILAEMERARLEYSGTDPNKRPFLPKLPSSRKLTITTKIVNEKIIPQFLNEKMGLEELHTVIYCGALTITRVMGRKVVARSENTPKPNYRKPGWMMRLEKRIEKIRADLNRLLGYKEGNRSRRLKKHVNNIMNEYNIHAKHNKNNNSIQETTDTIKQKLAALNKRLKRYKETTLRKTQNNQFTRNEKYFYDNLKTSTNKRGNGIPTKEEIENYWKTVWSNEVHHNDTADWIKKEGTANQNIPIMKHEEITTGELGNIIQKTHNWKATGIDNVHNYYYKYFTCTHSHLARTLNNIMNQPNTIPEFMTIGITYLKAKDNDTKNPSKYRLITCLPTIYKIFTSIIANRLYNHCDENKILAMEQKGCIKRSKGCKEQLIIDMVATEQIIKQRRNLHTSYIDFKKAYDSVPHSWLLRILDIYKVHPIIKNLLKSTMGKWQNKIILNNETGKIKTQYITINRGIFQGDALSPLWFCLALNPLSNLLRNTKTGIQIKYEKNVEYILSHLLYMDDIKLYGTTETQLKHLIELTHNFSNDIKMEFGVDKCRTQTIRKGEQIVLRLEGEQLPDIEPMDEEEMYKYLGMHQKKNTEHKVMKEKMREKYFQRVNMVLKSKLNGKNLIKAINTYAVPLLTYTFGILKWTQTEIKDIQTNTHVAMTKHRVHHPKASIERMTLKRKDGGRGLIDILNLHNKSIIKLREYFYSKQPESQYYTAIVKADKYTPLTLSDEHKTLKIVDDAEKLTRWREKALHGRFSHEVGQDTVDKTASYNWLIHGELQPETEGFFVAIQDQVIKTKNYRKYILKDGVDSDLCRKCKKGSETIQHIIGGCQALAQTDYKLRHDQIGKIIHQELALKYKLLNKKVNYYQYEPSTILENDEYEIYWDRTIITDKKIEHNRPDIVVKNKKDKEVLLIDFAVTNNNNLEQTYSEKISKYIDLCFEIKDMWRYKKVRVIPIAISNMGLIPKKLLKSLEELDIKSYHVQLMQKSVILNTCRTTRRFLYTK

SEQ ID NO: 32130 - protein, 1015 aa, Phalangium opilio
MKSVRSVRSGTHTPSPTVVRPQPVMKPCPHCGKAFKGDQGIRVHISNSHKEIFRAMVTANYQEKRKKSEGKVSATKASDQVSASIPPVTNAEHNESARLVEDTLGSSVDRIPGGQLTFTEINDFEQRLESLADDENRPALDTVCREFQTFLASVINRLPGPKHPASKYFDARKRNMGKEKHKGHRNSTNPQRERRNRSEKSRKEYLYEQAQFDYYNRRRKVWRSIAKQDHYVSCKVPMEGIQAHYEKLFAEPNACTRLKYEPATLMDDGVVDIPYTAEEILAAMKGIAIDTAPGPDRVLMRAVKETKCSKVIAWIATLMEKWTYVPSSLKIARSILIHKGGDEMNLNNFRSIMIFPLIRRIIERALDKRLRSQFQPCAAQRGFVATPGTHINASLVNGVLQSAKVKKSNCAVVFLDVAKAFDNVSHKHIVNTLNTLPIPERQRNLQMALITDNEVQIEANHHKSGKIKLNRGVPQGAPLSPTLFNIAIDFILKELTEETVAKAHGYEVVEGQKPISGLGFADDTVAGAKSKESMEVLVQIVMDGLRQIGLTVNCAKSKAIIIRHGRLDHSADAISTLSGDTIPTLKPGERVKYLDIDLKDGIVLDKAKVIQSVGNNLDLLVASPLWNPSQKHNIINQFIWPSVVYPLQSAPLRNLTKQFLDDLDRFIRGAVKPILLIPTDTPDMMIYSPRKLRGLGVVCAAWEAYLQHYSISLKLKTINDPVLNGCRDLQAEIHDCLNKLNIHLEDSSTTPSAQKIRDILRKNAFEEWSMLPGKGLGVIQFSEYPRANSWMTTGYGLSSSQWTTAIKMNCNSCATRGTKGRSEGTSSCRFPNCMKKESLCHVLQDCPATNDMVIARHNRVVTALEGLKVAGYEVYKEVHCVDNTTNTNKRAELVVIDRRGKIQCPDRAASDTQTPRGFIIDPTVRFEKDLGQANAVDLEKKAYMDPTHDYFRGKFTEIQEWETIGLYIGSRGTISKFFTDFIRRFNLPTAMINDISTAVIRDSISQLNFHLFHAH

SEQ ID NO: 32131 - protein, 1392 aa, Pachyrhynchus sulphureomaculatus
MLKNNNYSNDNGRVLRRRTPVVETAIATPQQQQPQTTQTTASAKTTPDSFTRSDIVGDGNCLFRAVSLHLYGHQNHHEKLREVALRYLQQNWSELHTFSLIEVDDIKDFNNYYNYMRKNGTYGTSLEILALSETQNSNFHIFSKQRRTRHTKITFTDRPTIISTGKYNKTIYLLLTGNPMSGHFELLTPQNIENIPDNSRPIKEASGERRNGRGRRGKWQLDQNDEDRATENGPAQSVVPASKPTPTKAGKPQQRMSCTTGINEHVMRCCNEITPDKEITDKRITRRLDPPPPIPSATDVDAGQIQPPKPGQTAYVLQGQHATTKTGKPRQRLKWTDEMNRTVMRCYYTATKLETVTSGYRLELHRLFLTEYPHLQLLVTEQRVIDQKRVITKNNRLTPFELQTIKDTVAAELNTDQPNNRNSRADTEPISHTQPPSRKQQDPPPSRSITQNNISKQIASTTRHHITDDKMNDSPPSTTSIQHHPESPLIQILKAEMQSHLARWSGTDPTTRNSIPRLIFKKSTQLILNTINKHIIPQYITDLSTIEDIHTIIYAAAITTITQNNQKLSQRQRDPNSRKPKFKWQIRIENKINNIRRDLGHLTQFMNGNASKRVTQSVNKIKSKSLNRTLPEIVDTLKQKLFVYAARLRRYKESNESKDTNNLFRRSEKQFYRKTMYNEQTVVTEPPNKQELADYWKTVWSEPKLHNNNTPWIKAEEDKHKRVTEQENSTLTTEEITETIKHAHNWKCPEIDNIQNFWYKQFTTTHEALTHQINKAILQPHTFPTFLTQGITYVKPKSSDTTNPSNYRPITCLPTLYKIITAAISKKIEQHLTDNNIITEEQKGCRKNSRGCKEQLIIDSVIMGQTRKEHRNLHIGYIDYKKAFDSIPHSWLIRALEIYKINQHLRQFLAQIMKTWKTKIRLETQTERIQTEELYIRRGIFQGDSLSALWFCLCLNPLSNILNRTEHGFNIRHQKVNQHKINHLLYMDDIKLYAATKTQLKELLKITEIFTLDVNMEFGISKCKVLHINKGQWKYHHETEIINNETLDNMFDKETYKYLGFQQSTKLNHTHIKTELRTEFKNRLTKLLQTKLNSKYLTKAINTFAIPILTYSFGIIKWSQTDLENIHILIRSQFTKYRKLHPNACKERLTIERKAGGRGIIDIRSLHTKQIQALRKFFHTKQTSLHTAIVKADKNYTPLDLSRVDHPADTHSHIQLQQEKMKTWSEKTLHGKHRYHIEQDHVNKKQSYTWLRDGQLFPETEGFLLAIQDKVILTRNYQKHIIKDPTITEDRCRKCHQQKETIEHITSGCKILAGTEYTARHDSAAKVVHQALATTYKLVENTDPYYKYTPTSVLENKDYKLYWDISIHTDKTVSANRPDITFQCKKKKKSPI

SEQ ID NO: 32132 - protein, 1484 aa, Pachyrhynchus sulphureomaculatus
MLNNNNYNNENGRVLRRRTRVVQTATATPQQQQLQTNQTTASVETTPDSFTRSDIVGDGNCLFRAVSLHLYGHQNHHEKLREVALRYLQQNWSELHAFSLIEVDDIKDFNNYYNYMRKNGTYGTSLEILALSETQNSNFHIFSKQRRTRHTKITFTNRPTIISTGKYNKTIYLLLTGNPMSGHFELLTPQNIENIPENNKPIKEASGERRNGRGRRGKWQLDQNDEDQATENGPAKSVVSATKPTPTKAGKSQQRMSCTTGINEHAMRCCNENTKPDKEITEKRITYRLDPPTSVPSATDVDTGQTQPPKPGQGPYVLQGQHATTKAGKPRQRLKWTDEMNRTVMRCYYTATKLETITSGYRPELHRLFLTEYPHLQLLVSEQRVIDQKRVITKNNRLTPLELQTIKDTVAVELNTDQPNNRNNKADSEPASHTQPPSRTQQDPPPRRSITQNNIASTAQHHITENNMNHSPPSTTSTQHHPESLLIQTLKAKMESHLARWSGTDPTTRNPIPRLIFRQSTQPILNTLNKHIIPQYITDLSTIEDIHTIIYAAAITTLTQNNQKLPQRQGNPNRTKPKFKWQIRIENKINNIRRDLGHLTQFISGNASKRVTQGANKIKSKSPNRTLPEILDTLKQKLSVYAARLRRYKESNERKDTNNLFRRSEKQFYRKTMYNKQIAVTEPPNKQELTDYWKSIWSEPKLLHNNNTPWIKAEEDKHKHVTEQENTTLNAQEITETIKHTHNWKCPGIDNIQNFWYKQFTTTHEALTHQINKAILQPHTFPTFLTQGITYVKPKSSDTTNPSNYRPITCLPTLYKIITATISKKIEQHLTDNNILTEEQKGCRKNSRGCKEQLIIDSVIMGQTRKEHRNLHIGYIDYKKAFDSIPHSWLIRALEIYKINQHLRQFLAQIMKTWKTKIRLETQTERIQTEELYIRRGIFQGDSLSALWFCLCLNPLSNILNRTEHGFNIRHQKVNQHKINHLLYMDDIKLYAATQTQLKELLKITEIFTLDVNMEFGISKCKVLHINKGQWKCHHETETINNETLDNMFDKETYKYLGFQQSTKLNHTHIKTELRTEFKNRLTTLLQTKLNSKNLTKAINTFAIPVLTYSFGIIKWSQTDIENIHILIRSQFTKYRKLHPNACKERLTIERKAGGRGIIDIRSLHTKQIQTLRKFFHSKQTSLHTATVKADKNYTPLDLARAEHSADTHSHTQLQQEKMKTWSEKTLHGKHRYHIEQDHVNKKQSYTWLQDGQLFPETEGFLLAIQDKVILTRNYQKHIIKDPTIAEDRCRKCHQQKETIEHITSGCKILAGTEYTARHDSAAKVVHQALATTYKLIENTDPYYKYTPTSILENEDYKLYWDIGIHTDKTVSANRPDITFQCKKGKVTYLIDIAVPNDINIQTKYTGKISKYTDLATEIKRLWRQEKVIIVPLIISATGLTPITFTPHLVQLDIHSNTDIHRNIQKSVILKTCNIVRSFLNTEW

SEQ ID NO: 32133 - protein, 902 aa, Pachyrhynchus sulphureomaculatus
MNGNASKRVTQGVDKIKSKSLNRTLPEIVDTLKQKLSVYAARLRRYKESNERKDTNNLFRRSEKQFYRKAMYNEQTVVTEPPNKQELADYWKTVWSEPKLHNNNTTWIKAEEDKHKRVTEQENSTLTTEEITETTKHTHNWKCPGIDNIQNFWYKQFTTTHETLIHQINKAILQPHTFPTFLTQGITYIKPKSSDTTNPSNYRPSTCLPTLYKIITAAISKKIELHLTDNNILTEEQKGCRKNSRGCKEQLIIDSVIMGQTRKEHRNLHIGYIDYKKAFDSIPHSWLIKALEIYKINQNLRQFLAQIMKTWKTKIRLETQTERIQTEELYIRRGTFQGDSLSALWFCLCLNPLSNILNRTEHGFNIKHQKVNQHKINHLLYMDDIKLYAATKTQLKELLKITEIFTLDVNMEFGISKCKVLHINKGQWKGHHETETINNETLDNMFDKETYKYLGFRQSTKLNHTHIKTELRTEFQNRLTKLLQTKLNSKNLTKAINTFAIPILTYSFGIIKWSQTDIENIHILIRSQFTKYRKLHPNACKERLTIERKAGGRGIIDIRSLHTKQIQALRKFFHTKQTSLHTATVKADKNYTPLDLSRVDHPADTHSHTQLQQEKMKTWSEKTLHGKHRYHIEQDHINKKQSYTWLRDGQLFPETEGFLLAIQDKVILTRNYQKHIIKDPTITEDRCRKCHQQKETIEHITSGCKILAGTEYTARHDSAAKVVHQALATTYKLIENTDPYYKYTPTSVLENKDYKLYWDISIHTDKTVSANRPDITFQCKKEKVTYLIDIAVPNETNIQTKYTEKISKYTDLATEIKRLWKQEKVIIVPLIISATGLTPTTFTPHLVQLGLNRNIHVALVLRIRMRFSFSSNLLYGERHPFGIICPALCFPPRTIYRDSRTT

SEQ ID NO: 32134 - protein, 987 aa, Pachyrhynchus sulphureomaculatus
MNRTVMRCYYTATKLETITSGYRQQLHRLFLTEYPHLQLLVSEQRVVDQKRVITKNNRLTPLELQTIKDTVAVELNTDQPNNRNNKADSEPASHTQPPSRTQQYPPPRRSITQNNIASTAQHHITDNNMNHSPPSTTSTQHHPESPLIQTLKAKMESHLARWSGTDPTTRNSIPRLIFKQSTQPIPNTLNKHIIPQYITDSSTIEDIHTIIYAAAITTLTQNNQKLPQRQGNPNRTKPKFKWQIRIENKINNIRRDLGYLTQFISGNASKRVTQGANKIKSKSPNRTLPEILDTLKQKLSVYAARLRRYKESNERKDTNNLFRRSEKQFYRKTMYNKQIAVTEPPNKQELTDYWKSIWSEPKQHNNNTPWIKAEEDKHKHVTEQENTTFNTQEITETIKHTHNWKCPGIDNIQNFWYKQFTTTHEALAHQINKAILQPHTFPTFLTQGITYVKPKSSDTTNPSNYRPITCLPTLYKIITATISKKIELHLTDNNILTEEQKGCRKNSRGCKEQLIIDSVIMGQTRKEHRNLHIGYIDYKKAFDSNNETLDNMFDKETYKYLGFQQSTKLNHTHIKTELRTEFKNRLTKLLQTKLNSKNLTKAINTFAIPILTYSFGIIKWSQTDIENIHILIRSQFTKYRKLHPNACKERLTIERKAGGRGIIDIRSLHTKQIQTLRKFFHSKQTSLHTATVKADKNYTPLDLARADHSADTHSHTQLQQEKMKTWSEKTLHGKHRYHIEQDHVNKKQSYTWLRDGQLFPETEGFLLAIQDKVILTRNYQKHIIKDQTIAEDRCRKCHQQKETIEHITSGCKILAGTEYTARHDSAAKVVHQALATTYRLIENTDPYYKYTPTSILENEDYKLYWDIGIHTDKTVSANRPDITFQCKKGKVTYLIDIAVPNDTNIQAKYTEKISKYTDLATEIKRLWRQEKVIIVPLIISATGLTPITFTPHLVQLGLNTDIHRGIQKSVILKTCNIVRSFLNTEWY

SEQ ID NO: 32135 - protein, 1363 aa, Pachyrhynchus sulphureomaculatus
MLNNNNYNNENGRVLRRRTPVVQTATATPQQQQLQTNQTTASVETTPDSFTRSDIVGDGNCLFRAVSSHLYGHQNHHEKLREVALRYLQQNWSELHTFSLIEVDDIKDFNNYYNYMRKNGTYGTSLEILALSETQNSNFHIFSKQRRTRHTKITFTDRPTIISTGKYNKTIYLLLTGNPMSGHFELLTPQNVENIPENNRPIKEASGERRNGRGRRGKWQLDQNDKDQATENGPAKSVVSATKPTPTKAGKSQQRMSCTTGINEHAMRCCNENTKPDKEITEKRITRRLDPPTSIPSVTDVDTGQTQPPKPGQGPYVLQGQHATTKAGKPRQRLKWTDEMNRTVMRCYYTATKLETITSGYRPELHRLFLTEYPHLQLLVSEQRVIDQKRVITKNNRLTPLELQTIKDTVAVELNTDQPNNRNNKADSELASHTQPPSRKQQDPPPRRSITQNNIATTAQHHITDNNMNHSPPSTTSTHHPESPLIQTLKEKMESHLARWSGTDPTTRNPIPRLIFKQSTQPILNTLNKHIIPQYITDLSTIEDIHTIIYAAAITTLTQNNQKLPQRQGNPNRTKPKFKWQIRIENKINNIRRDLGHLTQFISGNASKRVTQGANKIKSKSPNRTLPEILDTLKQKLSVYAARLRRYKESNERKDTNNLFRRSEKQFYRKTMYNKQIAVTEPPNKHYYTDYWKSIWSEPKLHNNNTPWINAEEDKHKYVTEQKNSTLNTQEITETIKHTYNWKCPGIDNIQNFWYKQFTTTHEALTHQINKAILQPHTFPTFLTQGITYIKPKSSDTTNPSNYRPITCLPTLYKIITATISKKIEQHLTDNNILTEEQKGCRKNSRGCKEQLIIDSVIMGQTRKEHRNIHIGYIDYNKAFDSIPHSWLIKALEIYKINQHLRQFLAQIMKTWKTKIRLETQTECIQTEELYIRRGIFQGDSLSALWFCLCLNPLSNILNRTEHGFNTRHRKVNQHKINHLIYMDDIELYAATQTQLKELLKITEIFTSDVNMEFGISKCKVLHINKGQWKCHHETETINNETLDNMFDKETYKSLGFQQSTKLNHTHIKTELRTEFKNRLTKLLQTKLNSKNLTKAINTFAIPILTYSFGIIKWSQTDIENIHILIRSQFTKYRKLHPNACKEGLTIERKAGGRGIIDIRSLHTKQIQATVKADKNYTPLDLARADHSADTHSHTQLQQEKMKTWSEKTLHGKHRYHIEQDHVNKKQSYTWLQDGQLFPETEDFLLAIQDKVILTRNYQKHIIKDPTIAEDRCRKCHQQKETIEHITSGCKILAGTEYTARHDSAAKVVHQALATTYKLIENTDPYYKYTPTSILENEDYKLYWDIGIHTDKTVSANRPDITF

SEQ ID NO: 32136 - protein, 1208 aa, Pachyrhynchus sulphureomaculatus
MSGHFELLTPQNIENIPENNRPIKEASGERRNGRGRRGKWQLDQNDEDQATENGPAKSVVSATKPTPTKAGKSQQRMSCTTGINEHAMRCCNENTKPDKEITEKRITRRLDPSTSIPSTTDVDTGQTQPPKPGQGPYVLQGQHATTKAGKPRQRLEWTDEMNRTVMRCYYTATKLETITSGYRQQLHRLFLTEYPHLQLLVSEQRVIDQKRVITKNNRLTPLELQTIKDTVAVELNTDQPNNRNNKADSEPASHTQPPSRTQQYPPPRRSITQNNIASTAQHHITDNNMNHSPPSTTSTQHHPESPLIQTLKAKMESHLARWSGTDPTTRNPIPRLIFRQSTQPILNTLNKHIIPQYITDLSTIEDIHTIIYAAAITTLTQNNQKLPQRQGNPNRTKPKFKWQIRIENKINNIRRDLGHLTQFISGNASKRVTQGANKIKSKSPNRTLPEILDTLKQKLFVYAARLRRYKESNERKDTNNLFRRSEKQFYRKTMYNKQIAVTEPPNKQELTDYWKSIWSEPKLHNNNTPWIKAEEYKHKHVTEQEDTTFNTQEITETIKHTHNWKCPGIDNIQNFWYKQFTTTHEALTHQINKAILQPHTFPTFLTQGITYVKPKSSDTTNPSNYRPITCLPTLYKIITATISKKIEHLTDNNILTEEQKGCRKNSRGCKEQLIIDSVIMGQTRKEHRNLHIGYIDYKKAFDSIPHSWLIRALEIYKINQHLRQFLAQIMKTWKTKIRLETQTERIQTEELYIRRGIFQGDSLSALWFCLCLNPLSNILSRTEHGFNIRHQKVNQHKINHLLYMDDIKLYAATQTQLKELLKITEIFTLDVNMEFGISKCKVLHINKGQWKCHHETETINNETLDNMFDKETYKYLGFQQSTKLNRTHIKTELRTEFKNRLTKLLQTKLNSKNLTKAINTFAIPILTYSFGIIKWSQTDIENIHILIRSQFTKYRKLHPNACKERLTIERKAGGRGIIDIRSLHTKQIQTLRKFFHSKQTSLHTATVKADKNYTPLDLARADHSADTHSHTQLQQAKMKTWSEKTLHGKHRYHIEQDHVNKKQSYTWLRDGQLFPETEGFLLAIQDKVILTRNYQKYIIKDPTIAEDRCRKCHQQKETIEHITSGCKILAGTEYTARHDSATKVVHQALATTYRLIENTDPYYKYTQHPYLKMKITSSTGISVSIQIKQSPPIDPILLFSAKKEKSPI

SEQ ID NO: 32137 - protein, 1343 aa, Pachyrhynchus sulphureomaculatus
MLKNNNYNNENGRVLRRRTPVVQTAIATPQQQLQTNQTTASVETTPDSFTRSDIVGDGNCLFRAVSLHLYGHQNHHEKLREVALRYLQQNWSELHTFSLIEVDDIKDFNNYYNYMRKNGTYGTSLEILALSETQNSNFHIFSKQRRTRHTKITFTDRPTIINTGKYNKTIYLLLTGNPMSGHFELLTPQNIENIPENNRPIKEASGERRNGRGRRGKWQLDQNDEDQATENGPAKSVVSATKPTPTKAGKSQQRMSCTTGINEHAMRCCNENTKPDKEITEKRITRRLDPPTSIPSTTDVDTGQTQPPKPGQGPYVLQGQHATTKAGKPRQRLKWTDEMNKTVMRCYYTATKLETITSGYRQQLHRLFLTEYPHLQLLVSEQRVIDQKRVITKNNRLTPLELQTIKDTVAVELNTDQPNNRNNKADSEPASHTQPPSRTQQYPPPRRSITQNNIASTAQHHITDNNMNHSPPSTTSTQHHPESPLIQTLKAKMESHLARWSGTDPTTRNPIPRLIFRQSTQPILNTLNKHIIPQYITDLSTIEDIHTIIYAAAITTLTQNNQKLPQRQGNPNRTKPKFKWQIRIENKINNIRRDLGHLTQFISGNASKRVTQGANKIKSKSPNRTLPEILDTLKQKLSVYAARLRRYKESNERKDTNNLFRRSEKQFYRKTMYNKQIAVTEPPNKQELTDYWKSIWSEPKLHNNNTPWIKAEEDKHKHVTEQENTTFNTQEITETIKHTHNWKCPGIDNIQNFWYKQFTTTHEAFTHQINKAILQPHTFPTFLTQGITYVKPKSSDTTNPSNYRPITCLPTLYKIITATISKKIEQHLTDNNILTEEQKGCRKNSRGCKEQLIIDSVIMGQTRKEHRNLHIGYIDYKKAFDSIPHSWLIRALEIYKINQHLRQFLAQIMKTWKTKIRLETQTERIQTEELYIRRGIFQGDSLSALWFCLCLNPLSNILNRTEHGFNIRHQKVNQHKINHLLYMDDIKLYAATQTQLKELLKITEIFTLDINMEFGISKCKVLHINKGQWKCHHETETINNETLDNMFDKETYKYLGFQQSTKLNHTHIKTELRTEFKNRLAKLLQTKLNSKNLTKAINTFAIPMLTYSFGIIKWSQTDIENIHILIRSQFTKYRKLHPNACKERLTIERKAGGRGIIDIRSLHTKQIQTLRKFFHSKQTSLHTATVKADKNYTPLDLARADHSADTHSHTQLQQEKMKTWSEKTLHGKHSYHIEQDHVNKKQSYTWLRDGQLFPETEGFLLAIQDKVILTRNYQKHIIKDPTIAEDRCRKCHQQKETIEHITSGCKILAGTEYTARHDSAAKVVHQALATTYRLIENTDPYYK

SEQ ID NO: 32138 - protein, 1065 aa, Pachyrhynchus sulphureomaculatus
MRCCDENTKPDKEITEKRITCRLDPPTSIPSATDVDTGQTQPPKTGQGPYVLQGQHATTKAGKPRQRLKWTDEMNRTVIRCYYTATKLETITSGYRPELHRLFLTEYPHLQLLVSEQRVIDQKRVITKNNRLTPLQLQTIKDTVAVELNTDQPNNRSNDADSEPASHTQPPSRTQQDPPPRRSVTQNNIASTAQHHITDNNMNHSPPSTTSTQHHSELPLIQTLKAKMESHLARWSGTDPTTRNPIPRLIFKQSTQPILNTLNKHIIPQYITDLSTIEDIHTIIYAAAITTLTQNNQKLPQRQGNPNRTKPKFKWQIRIENKINNIRKDLGHLTQFISGNASKRVTQGANKIKSKSPNRTLPEILDTLKQKLSVYAARLRRYKESNERKDTNNLFRRSEKQFYRKTMYNKQIAVTEPPNKQELTDYWKSIWSEPKLHNNNTPWIKAEEDKHKHVTEQENPTLNTQEITETIKHTHNWKCPGIDNIQNFWYKQFTTTHEALTHQINKAILQPHIFPTFLTQGITYVKPKSSDTTNPSNYRPITCLPTLYKIITATISKKIEQHLTDNNILTEEQKGCRKNSRGCKEQLIMGQTRKEHRNLHIGYIDYKKAFDSIPHSWLIRALEIYKINQHLRQFLAQIMKTCKTKIRLETQTERIQTEELYIRRGIFQGDSLSALWFCLCLNPLSNILNRTEHGFNIRHQKVNQHKINHLLYMDDIKLYAATQTQLKELLKITEIFTLDVNMEFGISKCKVLHINKGQWKCHHETETVNNETLDNMFDKETYKYLGFQQSTKLNHTHIKTELRTELKNRLTKLLQTKLNSKNLTKAINSFAIPILTYSFGVIKWSKTDIENIHILIRSQFTKYRKLHPNACKERLTIERKAGGRGIIDIRSLHTKQIQTLRKFFHSKQTSLHTATVKADKNYTPLDLARADHSADTHSHTQLQQEKMKTWSEKTLHGKHRYHIEQDHVNKKQSYTWLRDGQLFPETEGFLPAIQDKVILTRNYQKHIIKDPTIAEDRCRKCHQQKETIEHITSGCKILAGTEYTARHDSAAKVVHQALATTYKNS

SEQ ID NO: 32139 - protein, 1053 aa, Callosobruchus maculatus
MDRVNFMNNQRRPRVGRLNSPEPQTQTEQPIEHNPAADVLPTQPATTKAGKPRQRLQWTTEMNKSVMRCYYTATKLETISTGYRHELHRLFTIQYPHLSTRVTEQRLIDQKRVITKNNRLTPQELQDIKNLVSNEMNTVQPNDSLTTEQIVETQNSDTQTSQTSNTAKTNNTSIHSELGQEHDQALDTPDTTITNLPSTIIQIQNITRPFAVTQSVEQVMSTQYNKWCGTNPALRDPLPRLIFKNNTQQILHTVNANVIPQFIRDDSNLEDIHTVIYAAAATTLIVNGQKLSKRSKHQTSNRTKPKWQIRIENKISTIRKDLAHLPQYTINNNHPSRHIQRTINILKSKSPQQTIPEITDTLKQKLAVYAARLRRYNESNARKDANSLFQKSEKQFYQKITADNQITTIEFWGSLWSEPKTHNEDAPWIREEEEKHQHIAEQGDVILSKEEIVETIKHTHDWKCPGVDNVQNFWYKHFSSTYEVLTNQINKAIRQPDRLPKFLTQGITYIKPKNADPKNPANYRPITCLPTLYKIITATLCRRIEQHLTQNNILTEEQKGCRKQSQGCKEQLIIDSVIMEQTRKEHRNLHTCFIDYKKAFDSVPHSWLTKILQIYKINPGLRQFLAKTMKTWRTNIHLTTQDGHIQTEELHIRRGIFQGDSLSSLWFCLCLNPLSNALNNRNYGFNIRHQKVNQHRINHLLYMDDIKLYAATDVQLRELLRITEVYTSDVRMEFGMNKCKVLHINKGQWKNHPEQEIVTGQTLDNMDKEETYKYLGFNQSVKIDHTQIKAELRQVFRDRLIKLLKTKLNSRNLTKAINTFAIPILTYSFGIIKWSHTDIENIHILIRTELTKHRMSHPNACKERLTIDRTQGGRGITDIQSLRTRQIKTLRHFFQNKQTNLHRAIVKADKNYTPLNLSCPDHVADTHNPTQSQQEKISNWSQKPLHGKHRYRVTQDHINKKQSYTWLQDGQLFPETEGFMLAIQDQVIATRNYKKYIIKDPSITDDNCRKCQQQKETIDHITSGCKTLAGTEYTARHNSAAKVIHQALATTNS

SEQ ID NO: 32140 - protein, 867 aa, Callosobruchus maculatus
MNILKSKSPQQTIPEITDTLKQKLAVYAARLRRYNESNARKDANSLFQKSEKQFYQKITADNQITTIEPPSKQELTEFWGRLWSEPKTHNEDAPWIREEEEKHQHIAEQGDVILSKEEIVETIKHTHDWKCPGVDNVQNFWYKHFSSTYEVLTNQINKAIRQPDRLPKFLTQGITYIKPKNADTKNPANYRPITCLPTLYKIITATLCRRIEQHLTQNNILTEEQKGCRKQSQGCKEQLIIDSVIMEQTRKEHRNLHTCFIDYKKAFDSVPHSWLTKILQIYKINPGLRQFLAKTMKTWRTNIHLTTQDGHIQTEELHIRRGIFQGDSLSSLWFCLCLNPLSNALNNTNYGFNIRHQKVNQHRINHLLYMDDIKLYAATDVQLRELLRTTEVYTSDVRMEFGMNKCKVLHINKGQWKNHPEQEIVTGQTLDNMDKEETYKYLGFNQSVKIDHTQIKAELRQVFRDRLIKLLKTKLNSRNLTKAINTFAIPILTYSFGIIKWSHTDIENIHILIRTELTKHRMSHPNACKERLTIDRTQGGRGITDIQSLRTRQIKTLRHFFQNKQTNLHRAIVKADKNYTPLNLSCPDHVADTHNPTQSQQEKISTWSQKPLHGKHRYRVTQDHINKKQSYTWLQDGQLFPETEGFMLAIQDQVIATRNYKKYIIKDPSITDDNCRKCQQQKETIDHITSGCKTLAGTEYTARHNSAAKVIHQALATTNKLIENTDPYYNYTPTSVLENDQYKLYWDVQIHTDKTIPSNRPDIVFQSKLDKVTYLIDIAIPNDVNIQNTYAGKISKYTDLAMEIKRLWKQDKVTIVPLIMSVSGLTPNTFTPHLQQLGLDEKLHKTFQKSVILKTCNIVRSFLNSDQ

SEQ ID NO: 32141 - protein, 989 aa, Callosobruchus maculatus
MNTQYNKWCGTNPTLRDPLPRLIFKNNTLQILHTINVNIIPQFLTKDSDLEDIHTVIYAAAATTLTLNGQNLPKRSIARTTERSKPKWQIRIENKISTIRKDLAHLAQYTNNNNRSKRVQTTINILKSKSPQQTIPEIADTLKQKLAVYAARLRRYNESNARKDANNLFQKSEKQFYQKITADNQITAIEPPSKQELTEFWGSLWSEPKTHNENAPWIRQEEEKHQHIVEQGEVILTPEEIAETIKHTHNWKCPGVDNVQNFWYKQFSATYEMLTDQINKAILQPNRLPKFLTQGMTYIKPKNADTKNPANYRPITCLPTLYKIITATICRRIEQHLTQNNILTEEQKGCRKQSQGCKEQLIIDNVIMEQTRKEHRNLHTCFIDYKKAFDSVPHSWLAKTLQIYKINPGLREFLTRTMETWRTSIHLKTQNGHIKTDELHIRRGIFQGDSLSSLWFCLCLNPLSNALNNTNCGFNIRHEKLNQHRINHLLYMDDIKLYAANEVQLRKLIRITETCSSDVRMEFGLSKCKVLHINKGQWKDHPQQETVAGQTLNNVNKDETYKYLGFNQNVKIDHTQVKAQLTQEFRDRLIKLLKTKLNSRNLTKAINTFAIPVLTYSFGIIKWSHTDIENIHILIRTELTKHRMSHPNACKERLTIDRKQGGRGITDIQSPRTRQIKTLRHFFQNKQTNLHRAIVKADKNYTPLNLSCPDHVADTHNPTQSQQEKISAWSQKPLHGKHRYRITQDHINEKQSYIWLQDGQLFPETEGFMLAIQDQVIATRNYNKYVIKDPSITDDNCRKCHQQKETIDHITSGCKTLAGTEYTARHNSAAKVIHQALATTNKLIENSDPYYNYTPTSVLENDQYKLYWDVEIHTDKAIPANRPDIVFQSKADKITYLIDIAIPNDVNIQNTYAGKISKYTDLAMEMKRLWKQNKVTIVPLIMSVSGLTPNTFTQHLQQLGLDEKLHKVFQKSVILKTCNIVRSFLNSDQ

SEQ ID NO: 32142 - protein, 1209 aa, Callosobruchus maculatus
MDRVNFMNNQRRPRVRRLNSPEPQTQTEQPIEHNPAADVLPTQPATTKAGKPRQRLQWTTEMNKSVMRCYYTATKLETISTGYRHELHRLFTTQYPHLSTRVTEQRLIDQKRVITKNNRLTPQELQDIKNLVSNEMNTVQPNDSLTTEQIVETQNSDTQTSQTSNTAKTNNTSIHSELGPEHDQALDTPDTTITNLPSTIIQIQNITRPFAVTQSVEQVMSTQYNKWCGTNPALRDPLPRLIFKNNTQQILHTVNANVIPQFIRDDSNLEDIHTVIYAAAATTLIVNGQKLSKRSKHQTGNRTKPKWQIRIENKISTIRKDLAHLAQYTINNNHPSRHIQRTINILKSKSPQQTIPEITDTLKQKLAVYAARLRRYNESNARKDANSLFQKSEKQFYQKITADNQITTIEPPSKQELTEFWGSLWSEPKTHNEDAPWIREEEEKHQHIAEQGDVILSKEEIVETIKHTHDWKCPGVDNVQNFWYKHFSSTYEVLTNQINKAIRQPDRLPKFLTQGITYIKPKNADTKNPANYRPITCLPTLYKIITATLCRRIEQHLTQNNILTEEQKGCRKQGQGCKEQLIIDSVIMEQTRKEHRNLHTCFIDYKKAFDSVPHSWLTKLLQIYKINPGLRQFLAKTMKTWRTNIHLTTQDGHIQTEELHIRRGIFQGDSLSSLWFCLCLNPLSNALNNTNYGFNIRHQKVNQHRINHLLYMDDIKLYAATDVQLRELLRITEVYTSDVRMEFGMNKCKVLHINKGQWKNHPEQEIVTGQTLDNMDKEETYKYLGFNQSIKIDHTQIKAELRQVFRDRLIKLLKTKLNSRNLTKAINTFAIPILTYSFGIIKWSHTDIENIHILIRTELTKHRMSHPNACKERLTIDRTQGGRGITDIQSLRTRQIKTLRHFFQNKQTNLHRAIVKADKNYTPLNLSCPDHVADTHNPTQSQQEKISTWSQKPLHGKHRYRVTQDHINKKQSYTWLQDGQLFPETEGFMLAIQDQVIATRNYKKYIIKDPSITDDNCRKCQQQKETIDHITSGCKTLAGTEYTARHNSAAKVIHQALATTNKLIENTDPYYNYTPTSVLENDQYKLYWDVQIHTDKTIPANRPDIVFQSKLDKVTYLIDIAIPNDVNIQNTYAGKISKYTDLAMEIKRLWKQDKVTIVPLIMSVSGLTPNTFTPHLQQLGLDEKLHKTFQKSVILKTCNIVRSFLNSDQ

SEQ ID NO: 32143 - protein, 1003 aa, Callosobruchus maculatus
MAPLLAFQELGSSDHNTVSTLCRMHSPDLYHAKPRRVWHYGSAKWDDLREYYQSFPWNDVCFKSRDPSACAQEITEVLISGMEAYIPYVVKHPSKNKPWFNQRCRDAVTSKNQHYREWRKNPNAESHRSVIDARNHCKRVIDSSKEEHNQKIKNKLLSCPSSSRIFWSVAKAVSQNLSYSSIPPLTREDKSIASAPKEKADILGKLFAANSTVDFQGSTPTTIISVNSRMAEVKLQHRDVKSILQKLNTNKATGPDQIPAIVLKRCAAELAPILCKLFKHFSSTYQVLTNQINKAIRQPDRLPKFLTQGITYIKPKNADTKNPANYRPITCLPTLYKIITATLCRRIEQHLTQNNILTEEQKGCRKQSQGCKEQLIIDSVIMEQTRKEHRNLHTCFIDYKKAFDSVPHSWLTKILQIYKINPGLRQFLAKPMKTWRTNIHLTTQDGHIQTEELHIRRGIFQGDSLSSLWFCLCLNPLSNALNNTNYGFNIRHQKVNQHRINHLLYMDDIKLYAATDVQLRELLRITEVYTSDVRMEFGTNKCKVLHINKGQWKNHPEQEIVTGQTLDNMDKEETYKYLGFNQSVKIDHTQIKAELRQVFRDRLIKLLKTKLNSRNLTKAINTFAIPILTYSFGIIKWSHTDIENIQILIRTELTKHRMSHPNACKERLTIDRTQGGRGITDIQSLRTRQIKTLRHFFQNKQTNLHRAIVKADKNYTPLNLSCPDHVADTHNPTQSQQEKISTWSQKPLHGKHRYRVTQDHINKKQSYTWLQDGQLFPETEGFMLAIQDQVIATRNYKKYIIKDPSITDDNCRKCQQQKETIDHITSGCKTLAGTEYTARHNSAAKVIHQALATTNKLIENTDPYYNYTPTSVLENDQYKLYWDVQIHTDKTIPANRPDIVFQSKLDKVTYLIDIAIPNDVNIQNTYAGKISKYTDLAMEIKRLWKQDKVTIVPLIMSVSGLTPNTFTPHLQQLGLDEKLHKTFQKSVILKTCNIVRSFLNSDQ

SEQ ID NO: 32144 - protein, 1208 aa, Callosobruchus maculatus
MDKVSFSNNQRRPRVRRLNSPEPQSQTQQPIAHNPTADVLPVQPATTKAGKLRQRLQWTTEMNKSVMHCYYTATRLETISTGYRHELYRLFTAQYPHLSTRVTEQRLIDQKRVITKNNRLTPQELQAIKSLVSNEINTVAPNDSLADESITERQNNHTGSNQTPNTDTTNNTSIHLDVESEHEHIPDTPDQTSINLPSTATQSQNVTPPPCITQSTEQVMNTQYNKWCGTNPTLRDPLPRLIFKNNTRQILQTVNSNIIPQFLTNDSNLEDIHTVIYAAAATTLIVNGQKLPKRSKDHTSKRSKPKWQIRIENKISTIRKDLAHVTQYIHKNNLSKRIQTTISRLKSRSPQQTISEIYDTLKQKLAVYAARLRRYNESNDRKDTNNLFQKSERQFYQKITSNNQIAIIEPPSRKELTDFWGSLWSEPKTHNENAPWIRQEEEKQQHIPEQGDVILTPQEIEETIKHTHNWKCPGVDNVQNFWYKQFSATYEMLTDQINKAILQPNRLPKFLTRGVTYIKPKNADTKNPANYRPITCLPTLYKIITATIGKRIEQHLTQNNILTEEQKGCRKQSQGCKEQLIIDSVIMEQTRKEHRNLHTCFIDYKKAFDSVPHSWLTKTLQIYKINSTLRQFLTRAMETWRTNIHLKTQDGHIQTDELCIRRGIFQGDSLSSLWFCLCLNPLSNALNNTNYGFNIRHQKVNQHRISHLLYMDDIKLYAATEVQLKELLKITEVCTSDVRMEFGMSKCKVLHIHKGQWKNHSEQKILTGQTLDNMEKDETYKYLGFNQNIKIDHSEVKAQLTQEFRDRLSTLLKTKLNSKNLTKAINTFAIPVLTYSFGIIKWSHTDIENINILIRTELTKHRMSHPKACKERFTIDRKHGGRGIIDIQSLHTRQIKTLRDFFQSKETNLHRSIVKADKNYTPLTLSRPDHPADAHNHIELQQENINTWSQKALHGKHRYRVTQDHINERQSYTWLEDGQLFPETEGFMLAIQDQMIATRNYMKYIIKDTSITDDNCRKCHQQKETIDHITSACKTLAGTEYTARHNSAAKVIHQALATTNKLIENTDPYYNYTPTSVLENNEYKLYWDVEIHTDKTIPANRPDIVFQSKADKVTYLIDIAIPNDTNIQNAYAGKISKYTDLAIEIKRLWKQNKVTIVPLIMSVSGLTPNTFTPHLQQLGLDGRLHKIFQKSVILKTCNIVRSFLNSDA

SEQ ID NO: 32145 - protein, 899 aa, Callosobruchus maculatus
MRIENKITTIRKELAHLAQYTNNNNRSKRIQTTIDILKSKSPQKSIPEITDTLKQKLAVYAARLRRYNESNDRKDANNLFQKSEKQFYKKITTDNQITAIELPSKQELTEFWGSLWSEPKTHNENAPWIRQEEEKHQHIAEQGNVILTPEEIAETIKHTHNWKCPGVDNIQNFWYKQFSSVYEVITGQINKAILQPNRLPKFLTQGITYIKPKNADTKNPANYRPITCLPTLYKIITATICRRIEKHLTENSILTEEQKGCRKQSQGCKEQLIIDSVIMEQTRKEHRNLHTCFIDYKKAFDSVPHSWLTKTLQIYKINPGLRQFLTRTMETWRTNIHLQTEDGHIQTDELHIRRGIFQGDPLSSLWFCLCLNPLSNTLNSTNCGFTIRHQKANQHKINHLLYMDDLKLYAATEVQLRELLRITEVCTSDIKMEFGMSKCKVLHINKGQWKNHPEQEVVTGQALDNMDKDETYKYLGINQNAKIDHTKIKSQLTQEFKDRLIRLLRTKLNSKNLTKAINTFAIPILTYSFGIIKWSHTDIENIHILIRTELTKHRMSHPKACKERLTIDRKQGGRGIIDIQSLHAKQIKSLRHFFHSKQTNLHKAIVKADKNYTPLALSCPDHAADAHNHIQAQQEKINTWSQKALHGKHRYRVTQDHINEKQSYTWLQDGQLIPETEGFMLAIQDQVIATRNYRKYMMKDPSISDDNCRKCHQQKETIEHITSGCKTLAGTEYTARHNSAAKVIHQALATTNKLIENTDPYYNYTPTSVVENNQFKLYWDIEIHTDKTIPANRPDIVFQSKTDKVTYLIDIAIPNDMNIQNTYAGKISKYTDLAIEIKRLWKQNKVVIVPLIMSVSGLTPNTFTPHLQQLGLDEKLHKTFQKSVILKTCSIVRSFLNSE

SEQ ID NO: 32146 - protein, 761 aa, Callosobruchus maculatus
MEQGDVILTPEEIAETIKHTHNWKCPGVDNIQNFWYKQFSSTYEVLTDQINKAILQPNRLPKFLTQGITYIKPKNTDTKNPANYRPITCLPTLYKIITATICRRIEQHLTQNNILTEEQKGCRKQSQGCKEQLIIDSVIMEQTRKEHRNLHTCFIDYKKAFDSVPHSWLKKTLQIYKINSGLRQFLTRIMETWRTNIHLKTQHGHIQTDELHIRRGIFQGDSLSSLWFCLCLNPLSNALNNTNCGFNIRHEKVNQHKINHLLYMDDIKLYAATEVQLRELLRVTEVCTSDVRMEFGMSKCKVLHINKGQWKSHQERETLTGQTLDNMDKGETYKYLGFNQSVKIDHSQVKEQLIQEFRDRLIKLLKTKLNSRNLTKAINTFAIPVITYSFGIIKWSHTDIENIQILIRTELTRHRMSHPNACKERLTIDRKQGGRGIIDIQSLRTKQIKTLRHFFQSKQTNLHRAIVKADKNYTPLTLSSPNHAADTHNPIESQQEKINTWSQKALHGKHRYRITQDHINEKQSYTWLQEGQLFPETEGFMLAIQDQVIATRNYKKYIIKDPSVTNDNCRKCHQQKETIDHITSACKTLAGTEYTARHNSAAKIIHQALATTNKLIENTAPYYNYTPTSVLDNNQYKLYWDVEIHTDKTIPANRPDIVFQSKADKVTCLIDIAIPNDTNVQTAYAGKISKYTDLAIEVKRLWKQNKVVIVPLIMSVSGLTPDTFTPHLHQLGLDEKLHKIFQKSVILKTCNIVRSFLNSDQ

SEQ ID NO: 32147 - protein, 872 aa, Callosobruchus maculatus
MEQQPGVPEPGLRIQTTINRLKSKSPQQTIPEIARLRRYNESNDRKDANNLFQKSEKQFYQKMTSNNQITTTEPPSRQELTEFWGSLWSEPKTHNENAPWIRQEEEKHQHIAEQGDVVFTPDEIAETIKHTHNWKCPGVDNVQNFWYKQFSATYEMPTEQINKAILQPNRLPKFLTQGITYIKPKNGDTRNPANYRPITCLPTLYKIITATIGKRIEQHLTQNNILTEEQKGCRKQSQGCKEQLIIDSVIMEQTRKEHRNLHTCFIDYKKAFDSVPHRWLTKTLQIYKINPVLRQFLTRTMETWRTNIHLKTQDGHIQTEELLIRRGIFQGDSLSSLWFCLCLNPLSNALNNTNYGFNIRHQKVNQHRINHLLYMDDIKLYAATEVQLKELLRITEVCTSDVRMEFGMSKCKVLHINKGQWKNQSEQEILTGETLDNMDKDETYKYLGFNQNIKIDHTQAKAQLTQEFRNRLLKLLKSKLNSKNLTKAINTFAIPVLTYSFGIIKWSHTDIENIHILIRTELTKHRMSHPNACKERLTIDRKQGGRGIIDIQSLHTRQIKTLRDFFQSKQTNLHRSIVKADKNYTPLNLSRSDHSADGHNHIELQQEKINTWSQKALHGKHRYRVTQEHINERQSYIWLQDGQLFPETEGFMLSIQDQVIATRNYMKYIIKDASITDDNCRKCHQQKETIDHITSGCKTLAGTEYTARHNSAAKVIHQALATTNKLIENTDPYYNYIPTSVLENNEYKLYWDVEIHTDKTIPANRPDIVFQSKADKVTYLIDIAIPNDTNIQNAYAGKISKYTDLAIEIKRLWKQNKVTIVPLIMSVSGLTPNTFTPHLQQLGLDEKLHKIFQKSVILKTCNIVRSFLNSDP

SEQ ID NO: 32148 - protein, 1011 aa, Callosobruchus maculatus
MISLTYIIIIIIIITQTAEQVMNTQFNKWCGTNPALRDPLPRPIFKNNTQQILHTINTNLIPQFITNNSNLEDIHTVIYAAAATTLIVNGQKLQKRSKDQRSNRAKPKWQIRIENKISTLRKDLAHLAQYSNNNNHPSKHIQSTINILKSKSPQKSIPEIADTLKQKLAVYAARLRRYNESNDRKDANNLFQKSEKQFYQKITSNNQITTIEPPSRQELTAFWRSLWSEPKTHNENAPWIRQEETKHQHITEQGNVILTTEEIAETIKHTHNWKCPGVDNVQNFWYKQFSSTYEMLTDQINKAILQPNRLPKFLTQGITYIKPKNADTKNPANYRPITCLPTLYKIITATICRRIEQHLMQNNILTEEQKGCRKHSQGCKEQLIIDSVIMEQTRKEHRNLHTCFIDYKKAFDSVPHSWLMKTLQIYKINPGLRQFLKSTMETWRTNIHLQTHDGHIQTDELHIRRGIFQGDSLSSLWFCLCLNPLSNTLNSTNHGFNIRHHKADQHKINHLLYMDDIKLYAATEVQLRELLKITEVYTSDIRMKFGMSKCKVLHINKGQWKNQPEKEVVTGQPLDNMDKDETYKYLGFNQNVKIDHTQVKAQLTQKFKDRLIKLFKTKLNSKNLTKAINTFAIPVLTYSFGIIKWSHTDIENIHILIRTELTKHRMSHPNACKERLAIDRKLGGRGIIDIQSLRTTQIQTLRHFFHTKQTNLHKAIVKADKNYTPLNLSSPDHVADTYNHIQSQQEKINTWSQKALHGKHRYPVTQDHINQKHSYAWLQDGQLFPETEGFMLAIQDQVIATRNYKKYIIKDPSITDDNCRKCQQQKETIDHITSGCKTLAGTEYTARHNSAAKVIHQALATTNKLIENTDPYYNYTPTSVLENDQYKLYWDVEIHTDKTIPANRPDIVFQSKADKITYLIDIAIPNDVNIQNTYAGKISKYTDLAMEIKRLWKQNKVTIVPLIMSVSGLTPSTFTQHLQQLGLDEKLHKVFQKSVILKTCNIVRSFLNSNQ

SEQ ID NO: 32149 - protein, 1177 aa, Callosobruchus maculatus
MHKVTSKNNQRRPRVRRLNSPEPQTQTEQPRQHNPAADVLPAQPATTKAGKPRQRLQWTTEINKHVMHCYYTATQLETISTGYRHELHRLFIAQYPHLAERVTEQRLIDQKRVITKNNRLTPEELQAIKILVSNEINTAHPNHPQTSNRTTIDNTSIHSETDPEHEHTQHIPDSAVQPNDSLATKSITERHAIRTRNNQPPNTGTTNTTSIHLELDLENDHTPETTCTNLPSTATQSQNITLPPAITQSAEQVMNTQYNKWCGTNPTLRDPLPRLIFKNKTLQILHTINVNIIPQFLTKDSDLEDIHTVIYAAAATALTLNGQKLPKRSIARTTERSKPKWQIRIENKISTIRKDLAHLAQYTNNNNRSKRVQTTINMLKSKSPQQTIPEIADTLKQKLAVYAARLRRYNESNVRKDANNLFQKSEKQFYQKITADNQITAIEPPSKQELTEFWGSLWSEPKTHNENAPWIRQEEEKHQHIVEQEDVILTPEEIAETIKHTHNWKCPGVDNVQNFWYKQFSATYEMLTDQINKAILQPNRLPKFLTQGITYIKPKNADTKNPANYRPITCLPTLYKIITATICRRIEQHLTQNNILTEEQKGCRKQSQGCKEQLIIDSVIMEQTRKEHRNLHTCFIDYKKAFDSVPHSWLAKTLQIYKINPGLREFLASTMETWRTSIHLKTQDGLIKTDELHIRRGIFQGDSLSSLWFCLCLNPLSNALNNTNCGFNIRHDRLNQHKINHLLYLDDIKLYAANEAQLKELIRTTEACSSDVRMEFGMSKCKVLHINKGQWKDHPQQETVAGQTLNNMNKDETYKYLGFNQNVKIDHTQVKAQLTQEFRDRLIKLLKTKLNSRNLTKAINTFAIPVLTYSFGIIKWSHTDIENIHILIRTELTKHRMSHPNACKERLTIDRKQGGKGITDIQSLRTRQIKTLRHFFQNKQTNLHRAIVKADKNYTPLNLSCPDHVADTHNPTQSQQEKISTWSQKPLHGKHRYRITQDHINEKQSYTWLQDGQPFPETEGFMLAIQDQVIATRNYKKYVIKDPSITNDNCRKCQQQKETIDHITSACKTLAGTEYTARHNSAAKIIHQALATKNKLIENSDPYYKYTPTSVLENDHYKLYWDVEIHTDKTINANRPDIVFQIKADKVTYLIDIAIPNDVNVQNTYAGKISKYTDLAI

SEQ ID NO: 32150 - protein, 865 aa, Callosobruchus maculatus
MLKSKSPQQTIPEIADTLKQKLAVYAARLRRYNESNARKDANNLFQKSEKQFYQKITADNQITAIEPPSKQELTEFWGSLWSEPKTHNENAPWIRQEEEKHQHIVEQEDVILTPEEIAETIKHTHNWKCPGVDNVQNFWYKQFSATYEMLTDQINKAILQPNRLPKFLTQGITYIKPKNADTKNPANYRPITCLPTLYKIITATICRRIEQHLTQNNILTEEQKGCRKQSQGCKEQLIIDSVIMEQTRKEHRNLHTCFIDYKKAFDSVPHSWLAKTLQIYKINPGLREFLASTMETWRTSIHLKTQDGLIKTDELHIRRGIFQGDFLSSLWFCLCLNPLSNALNNTNCGFNIRHDRLHQHKINHLLYMDDIKLYAANEVQLKELIRTTEACSSDVRMEFGMSKCNVLHINKGQWKDHPQQETVAGQTLNNMNKDETYKYLGFNQNVKIDHTQVKAQLTQDFRDRLIKLLKTKLNSRNLTKAINTFAIPVLTYSFGIIKWSHTDIENIHILIRTELTKHRMSHPNACKERLTIDRKQGGRGITDIQSLRTRQIKTLRHFFQNKQTNLHRAIVKADKNYTPLNLSCPDHVADTHNPTQSQQEKISTWSQKPLHGKHRYRITQDHINEKQSYTWLQDGQLFPETEGFMLAIQDQVIATRNYKKYVIKDPSITNDNCRKCQQQKETIDHITSACKTLAGTEYTARHNSAAKIIHQALATKNKLIENSDPYYKYTPTSVLENDHYKLYWDVEIHTDKTINANRPDIVFQIKADKVTYLIDIAIPNDVNVQNTYAGKISKYTDLAIEVKRIWKQDKVIIVPFIMSVSGLTPNTFTQHLQQLGLDESLHKIFQKSVILKTCNIVRSFLNSDQ

SEQ ID NO: 32151 - protein, 1214 aa, Callosobruchus maculatus
MDRVNFMNNQRRPRVRRLNSPEPQTQTEQPIEHNPAADVLPTQPATTKAGKPRQRLQWTTEMNKSVMRCYYTATKLETISTGYRHELHRLFTTQYPHLSTRVTEQRLIDQKRVITKNNRLTPQELQDIKNLVSNEMNIVQPNDSLTTEQIVETQNSDTQNSDTQTSQTSNIAKTNNTSIHSELGPEHDQALDTPDTTTTNLPSTIIQIQNITRPFAVTQSVEQVMRTQYNKWCGTNPALRDPLPRLIFKNNTQQILHTVNANVIPQFIRNDSNLEDIHTVIYAAAATTLIVNGQKLSKRSKHQTSNRTKPKWQIRIENKISTIRKDLAHLAQYTINNNHPSRHIQRTINILKSKPPQQTIPEITDTLKQKLAVYAARLRRYNESNARKDANSLFQKSEKQFYQKITADNQITTIEPPSKQELTEFWGSLWSEPKTHNEDAPWIREEEEKHQHIAEQGDVVLSKEEIIETIKHTHDWKCPGVDNVQNFWYKHFSSTYQVLTNQINKAIRQPDRLPKFLTQGITYIKPKNADTKNPANYRPITCLPTLYKIITATLCRRIEQHLTQNNILTEEQKGCRKQSQGCKEQLIIDSVIMEQTRKEHRNLHTCFIDYKKAFDSVPHSWLTKILQIYKINPGLRQFLAKTMKTWRTNIHLTTQDGHIQTEELHIRRGIFQGDSLSSLWFCLCLNPLSNALNNTNYGFNIRHQKVNQHRINHLLYMDDIKLYAATDVQLRELLRITEVYTSDVRMEFGMNKCKVLHINKGQWKNHPEQEIVTGQTLDNMDKEETYKYLGFNQSVKIDHTQIKAELRQVFRDRLIKLLKTKLNSRNLTKAINTFAIPILTYSFGIIKWSHTDIENIQILIRTELTKHRMSHPNACKERLTIDRTQGGRGITDIQSLRTRQIKTLRHFFQNKQTNLHRAIVKADKNYTPLNLSCPDHVADTHDPTQSQQEKISTWSQKPLHGKHRYRVTQDHINKKQSYTWLQDGQLFPETEGFMLAIQDQVIATRNYKKYIIKDPSITDDNCRKCQQQKETIDHITSGCKTLAGTEYTARHNSAAKVIHQALATTNKLIENTDPYYNYTPTSVLENDQYKLYWDVQIHTDKTIPANRPDIVFQSKLDKVTYLIDIAIPNDVNIQNTYAGKISKYTDLAMEIKRLWKQDKVTIVPLIMSVSGLTPNTSTPHLQQLGLDEKLHKTFQKSVILKTCNIVRSFLNSDQ

SEQ ID NO: 32152 - protein, 1247 aa, Callosobruchus maculatus
MDKVTFTKNQRRPRVRRLNSPEPQIQTPEQPVAPNPAADVLPVQPATTKAGKPRQRLQWTTEMNKYVMHCYYTATKLETISTGYRHEFHRLFTAQYPHLSTRVTEQRLIDQKRVITKNNRLTPLELQTIKNLVADEINTVPPNDSLASESVAETQHIHTRNNQSPNTDTTDKTSKKNPVSNEINIVGSIMETQNIQSPNNHTPDTTTFNKTNIHFDTNPEHEQTPDIPNTTFTNSPSTTTQNRNINRPPSITQSAEEVMNIQFNKWCGTNPTLRDPLPRLILKNNTQQILHSINANVIPQFITNDSTLEDIHTVIYAAAATTLILNGQKLPKRSTDHTTERSKPKWQIRIENKISAIRKDLAHLAQYTNNNNPSKRVQRTVNILRSKSPQQTVPEIADTLKQKLAVYAARLRRYNESNARKDANNLFQKSEKQFYQKITSDNQITTIEPPSKQELTEFWGSLWSEPKTHNEDAPWIKQEEQKHQHIEEQGDIILTPEEIAETIKHTHNWKCPGVDNIQNFWYKQFSATYEMLANQINKAIIQPERFPKFLTQGITYIKPKNADTKNPANYRPITCLPTLYKIVTATICRRIEQHLTQNSILTEEQKGCRKQSQGCKEQLIIDSVIMEQTRKEHRSLHTCFIDYKKAFDSVPHSWLTKILQIYKINPGIRRFLTRTMETWRTSIHLKTQDGHIQTEELNIRRGIFQGDSLSSLWFCLCLNPLSNALKSTNYGFNIRHQKANQHRINHLLYMDDIKLYAATDVQLRELLRITEVCTSDVRMEFGMSKCKVLHINKGQWKNHPQQEIVTGQTLDNMDKEETYKYLGFKQSVKIDHTQTKAQLRQVFRDRLIKLLKTKLNSRNLTKAINTFAIPILTYSFGIIKWSHTDIENIHILIRTELTKHRMSHPNACKERLTIDRKQGGRGIIDIQSLHSRQIKTLRHFFQSKQTNLHRSIVKADKNYTPLNLSCPDHAADTYNHIQSQQEKINTWSQKALHGKHRYRVTQDHINERQSYTWLHDGQLFPETEGFMLAIQDQVIATQNYKKYIIKDPSITDDNCRKCHQQKETIDHITSGCKTLAGTEYTARHNSAAKVIHQALATTNKLIENTDPYYNYTPTSVIENNQYKLYWDVEIHTDKTIPANRPDIVFQSKLDKVTYLIDIAIPNDVNIQNTYAGKISKYTDLAMEIKRLWKQDKVTIVPFIMSVSGLTPNTFTPHLQQLGLDERLHKTFQKSVILKTCNIVRSFLNSDQ

SEQ ID NO: 32153 - protein, 1206 aa, Callosobruchus maculatus
MDKVSFSNNQRRPRVRRLNSPEPQNQTPQPIAHNPTADVLPVQPATTKAGKPRQRLQWTTEMNKSVMHCYYTATKLETISTGYRHELHRLFTAQYPHLSTRVTEQRLIDQKRVITKNNRLTPQELQAIKSLVSNEINTVPPNDSLADGSTTERQNIHSRNSQTPNTDTTNDTSIHSDIDSEHIPDTPDQTSINLPVTATQSQKVTPPPSITQSTEQVMDTQYNKWCGTNPVLRDPLPRLIYKNNTQQILHTINSNIIPQFLTNVSNLEDIHTVIYAAAATTLTVNGQKLPKRSKDHTSNRPKPKWQIRIENKISAIRKDLAHLAQYTNNNNRSKRIQTTIDILKSKSPQKSIPEIADTLKQKLAVYAARLRRYNESNERKNANNLFQKSEKQFYQKITANNQEATTEPPSRQDLTKFWSSLWSEPKTHNQDAPWIRQEEEKHQHIMEQGDVILTPEEIAETIKHTHNWKCPGLDNIQNFWYKQFSSTYEVLTDQINKAIRQPNRLPKFLTQGITYIKPKNTDTKNPANYRPITCLPTLYKIITATICRRIEQHLTQNNILTEEQKGCRKQSQGCKEQLIIDSVIMEQTRKEHRNLHTCFIDYKKAFDSVPHSWLKKTLQIYKINSGLRQFLTRIMETWRTNIHLKTQHGHIQTDELHIRRGIFQGDSLSALWFCLCLNPLSNALNNTNCGFNIRHEKVNQHKINHLLYMDDIKLYAATEVQLRELLRITEVCTSDVRMEFGMSKCKVLHINKGQWKSHQERETLTGQTLDNMDKGETYKYLGFNQSVKIDHSQVKEQLIQEFKDRLIKLLKTKLNSRNLTKAINTFAIPVITYSFGIIKWSHTDIENIQILIRTELTRHRMSHPNACKERLTIDRKQGGRGIIDIQSLRTKQIKTLRHFFQSKQTDLHRAIVKADKNYTPLTLSSPNHAADTHNPIELQQEKINTWSQKALHGKHRYRITQDHINEKQSYTWLQDGQLFPETEGFMLAIQDQVIATRNYKKYIIKDPSVTNDNCRKCHQQKETIDHITSACKTLAGTEYTARHNSAAKIIHQALATTNKLIENTDPYYNYTPTSVLDNNQYKLYWDVEIHTDKTIPANRPDIVFQSKADKVTYLIDIAIPNDTNVQAAYAGKISKYTDLAIEVKRLWKQNKVVIVPLIMSVSGLTPNTFTPHLHQLGLDEKLHKIFQKSVILKTCNIARSFLNSDQ

SEQ ID NO: 32154 - protein, 899 aa, Callosobruchus maculatus
MRIENKITTIRKELAHLAQYTNNNNRSKRIQTTIDILKSKSPQKSIPEITDTLKQKLAVYAARLRRYNESNDRKDANNLFQKSEKQFYKKITTDNQITATELPSKQELTEFWGSLWSEPKTHNENAPWIRQEEEKHQHIAEQGNVILTPEEIAETIKHTHNWKCPGVDNIQNFWYKQFSSVYEVLTDQINKAILQPNRLPKFLTQGITYIKPKNADTKNPANYRPITCLPTLYKIITATICRRIEKHLTENSILTEEQKGCRKQSQGCKEQLIIDSVIMEQTRKEHRNLHTCFIDYKKAFDSVPHSWLTKTLQIYKINPGLRQFLTRTMETWRTNIHLQTEDGHIQTDELHIRRGIFQGDSLSSLWFCLCLNPLSNTLNSTNCGFTIRHQKANQHKINHLLYMDDLKLYAATEVQLRELLRITEVCTSDIKMEFGMSKCKVLHINKGQWKNHPEQEVVTGQALDNMDKDETYKYLGINQNAKIDHTKIKSQLTQEFKDRLIRLLKTKLNSRNLTKAINTFAIPILTYSFGIIKWSHTDIENIHILIRTELTKHRMSHPKACKERLTIDRKQGGRGIIDIQSLHAKQIKSLRHFFHSKQTNLHKAIVKADKNYTPLALSCPDHAADAHNHIQAQQEKINTWSQKALHGKHRYRVTQDHINEKQSYTWLQDGQLFPETEGFMLAIQDQVIATRNYKKYIMKDPSISDDNCRKCHQQKETIEHITSGCKTLAGTEYTARHNSAAKVIHQALATTNKLIENTDPYYNYTPTSVLENNQFKLYWDIEIHTDKTIPANRPDIVFQSKTDKVTYLIDIAIPNDMNIQNTYAGKISKYTDLAIEIKRLWKQNKVVIVPLIMSVSGLTPNTFTPHLQQLGLDEKLHKTFQKSVILKTCSIVRSFLNSE

SEQ ID NO: 32155 - protein, 989 aa, Callosobruchus maculatus
MNTQYNKWCGTNPTLRDPLPRLIFKNNTLQILHTINVNIIPQFLTKDSDLEHIHTVIYAAAATTLTLNGQKFPKRSIARTTERSKPKWQIRIENKISTIRKDLAHLAQYTNNNNRSKRVQTTINILKSKSPQQTIAEIADTLKQKLAVYAARLGRYNESNARKDANNLFQKSEKQFYQKITADNQITATEPPSKQELTEFWGSLWSEPKTHNENAPWIRQEEEKHQHIVEQGDVTLTPEEIAETIKHTHNWKCPGVDNVQNFWYKQFSATYEMLTDQINKAILQPNRLPKFLTQGITYIKPKNADTKNPANYRPITCLPTLYKIITATICRRIEQHLTQNNILTEEQKGCRKQSQGCKEQLIIDSVIMEQTRKEHRNLHTCFIDYKKAFDSVPHSWLAKTLQIYKINPGLRQFLTRTMETWRTNIHLKTQDGHIKTDELHIRRGIFQGDSLSALWFCLCLNPLSNALNNTNCGFNIRHERLNQHKINHLLYMDDIKLYAANKVQLRELIRITEVCSSDVKMEFGMSKCKVLHINKGQWKDHPEQETVTGQTLNNMNKDETYKYLGFNQNVKIDHTKVKAQLTQEFRDRLIKLLKTKLNSRNLTKAINTFAIPVLTYSFGIIKWSHTDIENIHILIRTELTKHRMSHPNACKERLTIDRKQGGRGIIDIQSLRTRQIKILRHFFQNKQTNLHRAIVKADKNYTPLNLSCPDHAADTHNPTQSQQEKINTWSQKPLHGKHRYRITQDHINEKQSYTWLQDGQLFPETEGFMLAIQDQVIATRNYKKYIIKDPSITEDNCRKCHQQKETIDHITSGCKTLAGTEYTARHNSAAKVIHQALATVNKMIENTDPYYNYTPTSVLENDRYKLYWDVEIHTDKTIPANRPDIVFQSKADKVTYLIDIAIPNDTNVQTTYAGKISKYTDLAIEVKRLWKQDKVVIVPLIMSVSGLTPNTFTPHLHQLGLDEKLHKTFQKSVILKACNIVRSFLNSDQ

SEQ ID NO: 32156 - protein, 1244 aa, Callosobruchus maculatus
MHKVTSKNNQRRPRVRRLNSPEPETQTEQARDHNPAADVLPAQPATTKAGKPRQRLQWTTEINKHVMHCYYTATRLETISTGYRHELHRLFIAQYPHLAERVTEQRLIDQKRVITKNNRLTPEELQAIKILVSSEINAHPNHPQTSNKTTIDNSSIHSETNPEHEHTQHIPDTAAQPNDSLATESITERHAIRTRNNQPPNTGTINNTSIHLELDLEDDHTPDTPETACTNLPSTATQSQNITLPPAISQSAEHVMNTQYNKWCGTNPTLRDPLPRLIFKNNTLQILHTINDNIIPQFLTKDSDLEDIHTVIYAAAATTLTLNGQKLPKRSIARTTERSKPKWQIRIENKISTIRKDLAHLAQYTNNNNRSKRVQTTINILKSKSPQQTIPEIADTLKQKLAVYAARLRRYNESNARKDANNLFQKSEKQFYQKITADNQITAIEPPSKQELTEFWGSLWSEPKTHNENAPWIRQEEEKHQHIVEQRDVILTPEEIAETIKHTHNWKCPGVDNVQNFWYKQFSATYEMLTDQINKAILQPNRLPKFLTQGITYIKPKNADTKNPANYRPITCLPTLYKIITATICRRIEQHLTQNNILTEEQKGCRKQSQGCKEQLIIDSVIMEQTRKEHRNLHTCFIDYKKAFDSVPHSWLAKTLQIYRINPGLRQFLTRTMETWRTNIHLKTQDGYIKTDELHIRRGIFQGDSLSALWFCLCLNPLSNALNNTNCGFNVRHERLNQHKINHLLYMDDIKLYAANKVQLRELIRITEVCSSDVKMEFGMSKCKVLHINKGQWKDHPEQETVTGQTLNNMDKDETYKYLGFNQNVKIDHTKVKAQLTQEFRDRLIKLLKTKLNSRNLTKAINTFAIPVLTYSFGIIKWSHTDIENIHILIRTELTKHRMSHPNACKERLTIDRKQGGRGIIDIQSLRTRQIKILRHFFQNKQTNLHRAIVKADKNYTPLNLSCPDHAADTHNPTQSQQEKINTWSQKPLHGKHRYRITQDHINEKQSYTWLQDGQLFPETEGFMLAIQDQVIATRNYKKYIIKDPSITEDNCRKCHQQKETIDHITSGCKTLAGTEYTARHNSAAKIIHQALATVNKMIDNTDPYYNYTPTSVLENDRYKLYWDVEIHTDKTIPANRPDIVFQSKADKVTYLIDIAIPNDTNVQTTYAGKISKYTDLAIEVKRLWKQDKVVIVPLIMSVSGLTPNTFTPHLHQLGLDEKLHKTFQKSVILKTCNIVRSFLNSDQ

SEQ ID NO: 32157 - protein, 810 aa, Callosobruchus maculatus
MTSNNQITTTEPPSRQELTEFWGSLWSEPKTHNENAPWIRREEEKHQHIAEQGDVVFTPDEIAETIKHTHNWKCPGVDNVQNFWYKQFSATYEMLTEQINKAILQPNRLPKFLTQGITYIKPKNGDTRNPANYRPITCLPTLYKIITSTIGKRIEQHLTQNNILTEEQKGCRKQSQGCKEQLIIDSVIMEQTRKEHRNLHTCFIDYKKAFDSVPHSWLTKTLQIYKINPVLRQFLTRTMETWRTNIHLKTQDGHIQTEELLIRRGIFQGDSLSSLWFCLCLNPLSNALNNTNYGFNIRHQKVNQHRINHLLYMDDIKLYAATEVQLKGLLRITEVCTSDVRMEFGMSKCKVLHINKGQWKNQSEQEILTGETLDNMDKDETYKYLGFNQNIKIDHTQAKAQLTQEFRNRLLKLLKSKLNSKNLTKAINTFAIPVLTYSFGIIKWSHTDIENIHILIRTELTKHRMSHPNACKERLTIDRKQGGRGIIDIQSLHTRQIKTLRDFFQSKQTNLHRSIVKADKNYTPLNLSRSDHSADGHNHIELQQEKINTWSQKALHGKHRYRVTQEHINERQSYTWLQDGQLFPETEGFMLAIQDQVIATRNYMKYIIKDTSITDDNCRKCHQQKETIDHITSGCKTLAGTEYTARHNSAAKVIHQALATTNKLIENTDPYYNYTPTSVLENNEYKLYWDVEIHTDKTIPANRPDIVFQSKADKVTYLIDIAIPNDTNIQNAYAGKISKYTDLAIEIKRLWKQNKVTIVPLIMSVSGLTPNTFTPHLQQLGLDEKLHKIFQKSVILKTCNIVRSFLNSDP

SEQ ID NO: 32158 - protein, 990 aa, Callosobruchus maculatus
MNTQYNKWCGTNPVLRDPLPRLIFKNNTRQILHTINANIIPQFLTNDSDLEDIHTVIYAAAATTLIVNGQKLPKRSKNHTSKRSKPKWQIRIENKISTLRKDLAHVTQYTNNNNLSKRIQTTINRLKSKSPQQTIPEIADTLKQKLAVYAARLRRYNESNDRKDANNLFQKSEKQFYQKMTSNNQITTTEPPSRQELTEFWGSLWSEPKTHNENAPWIRQEEEKHQHIAEQGDVVFTPDEIAETIKHTHNWKCPGVDNVQNFWYKQFSATYEMLTEQINKAILQPNRLPKFLTQGITYIKPKNGDTRNPANYRPITCLPTLYKIITATIGKRIEQHLTQNNILTEEQKGCRKQSQGCKEQLIIDSVIMEQTRKEHRNLHTCFIDYKKAFDSVPHSWLTKTLQIYKINPVLRQFLTRTMETWRTNIHLKTQDGHIQTEELLIRRGIFQGDSLSSLWFCLCLNPLSNALNNTNYGFNIRHQKVNQHRINHLLYMDDIKLYAATEAQLKELLRITEVCTSDVRMEFGMSKCKVLHINKGQWKNQSEHEILTGEMLDNMDKDETYKYLGFNQNIKIDHTQVKAQLTQEFRNRLLKLLKSKLNSKNLTKPINTFAIPVLTYSFGIIKWSHTDIENIHILIRTELTKHRMSHPNACKERLTIDRKQGGRGIIDIQSLHTRQIKTLRDFFQSKQTNLHRSIVKADKNYTALNLSRSDHSADGHNHIELQQEKINTWSQKALHGKHRYRVTQEHINERQSYTWLQDGQLFPETEGFMLAIQDQVIATRNYMKYIIKDTSITDDNCRKCHQQKETIDHITSGCKTLAGTEYTARHNSAAKVIHQALATTNKLIENTDPYYNYTPTSVLENNEYKLCWDVEIHTDKTIPANRPDIVFQSKADKVTYLIDIAIPNDTNIQNAYAGKISKYTDLAIEIKRLWKQNKVTIVPLIMSVSGLTPNTFTPHLQQLGLDEKLHKIFQKSVILKTCNIVRSFLNSDPY

SEQ ID NO: 32159 - protein, 1244 aa, Callosobruchus maculatus
MDKVTFAKNQRRPRVRRLNSPEPQIQTPEQPIALNPAADVLPVQPATTKAGKPRQRLQWTTEMNKSVMHCYYTATKLETISTGYRHEFHRLFTAQYPHLSTRVTEQRLIDQKRVITKNNRLTPLELQAIKNLVANETNTVQLNDSIASESITETQLIQTRNNQSPNTDTTNKTGKKSPVSNEIKMVESITETQNTLFRNNQTPDATNKTNIHFEINPEHEHTPDTPNTQFTNSPSTITQNRNINRPPSITQSAEEVMNIQFNKWCGTDPTLRDPLPRLIFKNNTQQILNTINSNIISQFLTNVSNLEDIHTVIYAAAATTLIVNGQKLPKRSKDHTSKMSKPKWQIRIENKISTIRKDLAHLAQYTNNNRSKRIQTTIDILESKSPQKSIPEIADTLKQKLAVYAARLRRYNESNERKDANNLFKKSEKKFYQKITANNQEATIDPPNRQELTEFWSSLWSEPKTHNQDAPWIRQEEEKHQHIMEQGDVILTPEEIAETIKHTHNWKCPGVDNIQNFWYKQFSSTYEVLTDQINKAILQPNRLPKFLTQGITYIKPKNADTKNPANYRPITCLPTLYKIITATICRRIEQHLTQNNILTEEQKGCRKQSQGCKEQLIIDSVIMEQARKEHRNLHTCFIDYKKAFDSVPHSWLKKTLQIYKINPGLRQFLTRTMETWRTNIHLKTQHGHIQTDELHIRRGIFQGDSLSSLWFCLCLNPLSNALNNSNCGFNIRHAKVNQHKINHLLYMDDIKLYAATEIQLRELLRITEVCTSDVRMEFGMSKCKVLHINKGQWKSHQEREIVTGQTLDNMDKDETYKYLGFNQSVKIDHSQVKEQLVQEFRDRIIKLLKTKLNSRNLTKAINTFAIPVLTYSFGIIKWSHTDIENIQILIRTVLTKHRMSHPNACKERLTIDRKQGGRGIIDIQSLRTKQIKTLRHFFRSKQTNLHRAIVKADKNYTPLALSNPDHAADTHNPIESQQEKINTWSQKALHGKHRYRITQDHINEKQSYTWLQDGQLFPETEGFMLAIQDQVIATRNYKKYIIKDPSVTNDNCRKCQQQKETIDHITSACKTLAGTEYTARHNSAAKIIHQALATTNKLIENADPYYNYTPTSVLDNNQYKLYWDVEIHTDKTITANRPDIVFQSKAAKVTYLIDIAIPNDTNIQTTYAGKISKYTDLAIEVKRLWKQNKVVIVPLIMSVSGLTPNTFTPHLHQLGLDEKLQKIFQKSVILKTCSIVRSFLNSDQ

SEQ ID NO: 32160 - protein, 1245 aa, Callosobruchus maculatus
MHRVTSKNNQRRPRVRRLNSPEPQTQTEQPIERNPAADVLPAQPTTTKAGKPRQRLQWTTEMNKSVMHCYYTATRLETISTGYRHELHRLFIAQYPHLAERVTEQRLIDQKRVITKNNRLTPEELQAIKILVSNEVNTVRQNDPQTSNTTTSDNTTIPTEIDPEQEHTQDRPDTAVQPNDSLAIESITEGHTIHTRNNQPPNKDTTNDTSIHLEIDPEHEHAPHTPETTCSNLPSTATQSQNITLPPAITQSAKQVMNTQYNKWCGTNPVLRDPLPRLIFKNNTRQILHTINANIIPQFLTNDSDLEDIHTVIYAAAATTLIVNGQKLPKRSKNHTSKRSKPKWQIRIENKISTLRKDLAHVTQYTNNNNLSKRIQTTINRLKSKSPQQTIPEIADTLKQKLAVYAARLRRYNESNDRKDANNLFQKSEKQFYQKMTSNHQITTTEPPSRQELTEFWGSLWSEPKTHNENAPWIRQEEEKHQHIAEQADVVFTPDEIAETIKHTHNWKCPGVDNVQNFWYKQFSATYEMLTEQINKAILQPNRLPKFLTQGITYIKPKNGDTRNPANYRQITCLPTLYKIVTATIGKRIEQHLTQNNILTEEQKGCRKQSQGCKEQLIIDSVIMEQTRKEHRNLHTCFIDYKKTFDSVPHSWLTKTLQIYKINPVLRQFLTRTMETWRTNIHLKTQDGHIQTEELLIRRGIFQGDSLSSLWFCLCLNPLSNALNNTNYGFNIRHQKVNQHRINHLLYMDDIKLYAATEVQLKELLRITEVCTSDVRMEFGMSKCKVLHINKGQWKNQSEQEILTGETLDNMDKDETYKYLGFNQNIKIDHTQVKAQLTQEFRNRLLKLLKSKLNSKNLTKAINTFAIPVLTYSFGIIKWSHTDIENIHILIRTELTKHRMSHPNACKERLTIDRKQGGRGIIDIQSLRTRQIKTLRDFFQSKQTNLHRSIVKADKNYTPLNLSRSDHSADGHNHIELQQEKINTWSQKALHGKHRYRVTQDHINERQSYTWLQDGQLFPETEGFMLAIQDQVIATRNYMKYIIKDTSITDDNCRKCHQQKETIDHITSGCKTLAGTEYTARHNSAAKVIHQALATTNKLIENTDPYYNYTPTSVLENNEYKLYWDVEIHTDKTIPANRPDIVFQSKADKVTYLIDIAIPNDTNIQNTYAGKISKYTDLAIEIKRLWKQNKVTIVPLIMSVSGLTPNTFTPHLQQLRLDEKLHKIFQKSVILKTCNIVRSFLNSDP

SEQ ID NO: 32161 - protein, 1027 aa, Callosobruchus maculatus
MTNPRITQFNKRCNTTTQNQNQNIARSPSITRTAEQVMNTQFNKWCGTNPALRDPLPRLIFKNNTQQILHTINTNLIPQFITNNSNLEDIHTVIYAAAATTLIVNGQKLQKRSKDQRSNRAKPKWQIRIENKISTLRKDLAHLAQYSNNNNHPSKHIQRTINILKSKSPQKSIPEIADTLKQKLAVYAARLRRYNESNDRKDANNLFQKSEKQFYQKITSNNQITTIEPPSRQELTAFWRSLWSEPKTHNENAPWIRQEETKHQHITEQGNVILTTEEIAETIKHTHNWKCPGVDNVQNFWYKQFSSTYEMLTDQINKAILQPNRLPKFLTQGITYIKPKNADTKNPANYRPITCLPTLYKIITATICRRIEQHLMQNNILTEEQKGCRKHSQGCKEQLIIDSVIMEQTRKEHRNLHTCFIDYKKAFDSVPHSWLMKTLQIYKINPGLRQFLKSTMETWRTNIHLQTHDGHIQTDELHIRRGIFQGDSLSSLWFCLCLNPVSNTLNSTNHGFNIRHHKADQHKINHLLYMDDIKLYAATEVQLRELLKITEVYTSDIRMEFGMSKCKVLHINKGQWKNQPEKEVVTGQPLDNMDKDETYKYLGFNQNVKIDHTQVKAQLTQEFKDRLIKLLKTKLNSKNLTKAINTFAIPVLTYSFGIIKWSHTDIENIHILIRTELTKHRMSHPNACKERLAIDRKLGGRGIIDIQSLRTTQIQTLRHFFHTKQTNLHKAIVKADKNYTPLNLSSPDHVADTYNHIQSQQEKINTWSQKALHGKHRYRVTQDHINQKQSYAWLQDGQLFPETEGFMLAIQDQVIATRNYKKYIIKDPSITDDNCRKCQQQKETIDHITSGCKTLAGTEYTARHNSAAKVIHQALATTNKLIENTDPYYNYTPTSVLENDQYKLYWDVEIHTDKTIPANRPDIVFQSKADKITYLIDIAIPNDVNIQNTYAGKISKYTDLAMEIKRLWKQNKVTIVPLIISVSGLTPSTFTQHLQQLGLDEKLHKVFQKSVILMTCNIVRSFLNSDQ

SEQ ID NO: 32162 - protein, 1031 aa, Callosobruchus maculatus
MDSEHEHIPDTPDQTSINPPLTATQSQKVTPPPSITQSTEQVMDTQYNKWCGTNPALRDPLPRLIFKKNTQQILHTINSNIIPQFLTNVSNLEDIHTVIYAAAATTLTVNGQKLPKRAKGHTSNRPKPKWQIRIENKISAIRKDLAHLAQYTNNNNRSKRIQTTIDIFKSKSPQKSIPEIADTLKQKLAVYAARLRRYNESNERKNANNLFQKSEKQFYQKITANNQEATIEPPSRQDLTEFWSSLWSEPKTHNQDAAWIRQEEEKHQHIMEQGDVILTPEEIAETIKHTHNWKCPGVDNIQNFWYKQFSSTYEVLTDQINKAILQPKRLPKFLTQGITYIKPKNTDTKNPANYRPITCLPTLYKIITATICRRIEQHLTQNNILTEEQKGCRKQSQGCKEQLIIDSVIMEQTRKEHRNLHTCFIDYKKAFDSVPHSWLKKTLQIYKINSGLRQFLTRIMETWRTNIHLKTQHGHIQTDELHIRRGIFQGDSLSSLWFCLCLNPLSNALNNTNCGFNIRHEKVNQHKINHLLYMDDIKLYAATEVQLRELLIITEVCTSDVRMEFGMSKCKVLHINKGQWKSNQERETLTGQTLDNMDKGETYKYLGFNQSVKIDHSQVKEQLIQEFRDRLIKLLKTKLNSRNLTKAINTFAIPVITYSFGIIKWSHTDIENIQILIRTELTRHRMSHPNACKERLTIDRKQGGRGIIDIQSLRTKQIKTLRHFFQSKQTNLHRAVVKADKNYTPLTLSSPNHAADTHNPIELQQEKINTWSQKALHGKHRYRITQDHINEKQSYVWLQDGQLFPETEGFMLAIQDQVIATRNYKKYIIKDPSVTNDNCRKCHQQKETIDHITSACKTLAGTEYTARHNSAAKIIHQALATTNKLIENTAPYYNYTPTSVLDNNQYKLYWDVEIHTDKTIPANRPDIVFQSKADKVTYLIHIAIPNDTNVQTAYAGKISKYTDLAIEVKRLWKQNKVVIVPLIMSVSGLTPNTFTPHLHQLGLDEKLHKIFQKSVILKTCNIVRSFLNSDQ

SEQ ID NO: 32163 - protein, 1245 aa, Callosobruchus maculatus
MHKVTSKNNQRRPRVRRLNSPEPQTQTEQPREHNPAADVLPAQPATTKAGKPRQRLQWTTEINKHVMHCYYTATKLETISTGYRHELHRLFIAQYPHLAERVTEQRLIDQKRVITKNNRLTPEELQAIKILVSNEINTAHPNHPQTSNKTIIDKTSIHSEADPEHEHTQHIPDTAVQPNDSLATESITERHAIRTRNNQPPNTGTTNNTSIHLELDLENDHTPDTPETTCTNLPSTAAQSQNVTIPPAITQSAEQVMNTQYNKWCGTNPTLRDPLPRLIFKNNTLQILHTINVNIIPQFLTKDSDLEDIHTVIYAAAATTLTLNGQKLPKRSIARTTEISKPKWQIRIENKISTIRKDLAHLAQYTNNNNSSKRVQTTINILKSKSPQQTIPEIADTLKQKLAVYAARLRRYNESNARKDANNLFQKSEKQFYQKITADNQITAIEPPSKQELTEFWGSLWSEPKTHNENAPWIRQEEERHQHIVEQGDVILTPEEIAETIKHTHNWKCPGVDNVQNFWYKQFSATYEMLADQINKAILQPNRLPKFLTQGITYIKPKNADTKNPANYRPITCLPTLYKIITATIGRRIEQHLTRNNILTEEQKGCRKQSQGCKEQLIIDNVIMEQTRKEHRNLHTCFIDYKKAFDSVPHSWLAKTLQIYKINPGLREFLTRTMETWRTSIHLKTQDGLIKTDELHIRRGIFQGDSLSSLWFCFCLNPLSNALNNTNCGFNIRHNRLNQHKINHLLYMDDIKLYAANEVQLKELIRTTEACSSDVRMEFGMSKCKVLHINKGQWKDHPQQGTVAGQTLDNMNKDETYKFLGFNQNVKIDHTQVKSQLTQEFRDRLIKLLKTKLNSRNLTKAINTFAIPVLTYSFGIIKWSHTDIENIHILIRTELTKHRMSHPNACKERLTIDRKQGGRGITDIQSLRTRQIKTLRHFFQNKQTNLHRAIVKADKNYTPLNLSCPDHVADTHNPTLSQQEKISTWSQKPLHGKHRYRITQDHINEKQSYTWLQDGQLFPETEGFMLAIQDQVIATRNYKKYIIKDPSITNDNCRKCQQQKETIDHITSACKTLAGTEYTARHNSAAKIIHQALATKNKLIENSDPYYKYTPTSVLENDHYKLYWDVEIHTDKTINANRPDIVFQIKADKVTYLIDIAIPNDVNVQNTYAGKISKYTDLAIEVKRIWKQHKVIIVPLIMSVSGLTPNTFTQHLQQLGLDESLHKIFQKSVILKTCNIVRSFLNSDQ

SEQ ID NO: 32164 - protein, 1123 aa, Callosobruchus maculatus
MDKVSFSNNQRRPRVRRLNSPEPQSQTQQPIAHNPTADVLPVQPATTKAGKPRQRLQWTTEMNKSVMHCYYTATRLETISTGYRHELYRLFTAQYPHLSTRVTEQRLIDQKRVITKNNRLTPQELQAIKSLVSNEINTVTPNDSLADESIAERQSNHTGSNQTPNTDTTNNTNIHLDVESEHEHIPDTPDQTSINLPSTATQSQNVTPPPCITQSTEQVMNTQYNKWCGTNPTLRDPLPRLIFKNNTRQILQTVNSNIIPQFLTKDSNLEDIHTVIYAAAATTLIVNGQKLPKRLKDHTSKRSKPKWQIRIENKISTIRKDLAHVTQYIHKNNLSKRIQTTISRLKSRSPQQTISEIYDTLKQKLAVYAARLRRYNESNDRKDTNNLFQKSERQFYQKITSNNQITTIEPPSRKELTDFWGSLWSEPKTHNENAPWVRQEEEKQQHIPEQGDVILTPQEIAETIKHTHNWKCPGVDNVQNFWYKQFSATYEMLTDQINKAILQPNRLPKFLTQGVTYIKPKNADTKNSANYRPITCLPTLYKIITATIGKRIEQHLTQNNILTEEQKGCRKQSQGCKEQLIIDSVIMEQTRKEHRNLHTCFIDYKKAFDSVPHSWLTKTLQIYKINPTLRQFLTRIMETWRTNIHLKTQDGHIQTEELYIRRGIFQGDSLSSLWFCLCLNPLSNALNNTNYGFNIRHQKVNQHRISHLLYMDDIKLYAATEVQLKELLKITEVCTSDVRMEFGMSKCKVLHIHKGQWKNHSEQEILTGETLDNMEKDETYKYLGFNQNIKIDHSEVKAQLTQEFRDRLITLLKTKLNSKNLTKAINTFAIPVLTYSFGIIKWSHTDIENINILIRTELTKHRMSHPKACKERLTIDRKHGGRGIIDIQSLHTRQIKTLRNFFQSKETNLHRSIVKADKNYTPLTLSRPDHPADAHNHIELQQAKINTWSQKALHGKHRYRVTQDHVNERQSYTWLQDGQLFPETEGFMLAIQDQVIATRNYMKYIIKDTSITDDNCRKCHQQKETIDHITSACKTLAGTEYTARHNSAAKVIHQALATTNKLIENTDPYYNYTPTSVLENNEYKLYWDVEIHTDKTIPANRPDIVFQSKTDKVTYLNRYCDSR

SEQ ID NO: 32165 - protein, 1242 aa, Callosobruchus maculatus
MSYIFINEWATVPQHSTVDIIIYNNNNNTRGNTMDRVNFMNNQRRPRVRRLNSPEPQTQTEQPIEHNPAADVLPTQPATTKAGKPRQRLQWTTEMNKSVMRCYYTATKLETISTGYRHELHRLFTTQYPHLSTRVTEQRLIDQKRVITKNNRLTPQELQDIKNLVSNEMNIVQPNDSLTTEQIVETQNSDTQTSQTSNTAKTNNTSIHSELGPELDQALDTPDTTITNLPSTIIQIQNITRPFAVTQSVEQVMSTQYNKWCGTNPALRDPLPRLIFKNNTQQILHTVNANVIPQFIRDDTNLEDIHTVVYAAAATTLIVNGQKLSKRSKHQTSNRTKPKWQIRIENKISTIRKDLAHLAQYTINNNHPSRHIQRTINILKSKSPQQTIPEITDTLKQKLAVYAARLRRYHESNARKDANSLFQKIEKQFYQKITADNQITTIEPPSKQELTEFWGSLWSEPKTHNEDAPWIREEEEKHQHIAEQGDVILSKEEIVETIKHTHDWKCPGVDNVQNFWYKHFSSTYEVLTNQINKAIRQPDRLPKFLTQGITYIKPKNADTKNPANYRPITCLPTLYKIITATLCRRIEQHLTQNNILTEEQKGCRKQSQGCKEQLIIDSVIMEQTRKEHRNLHTCFIDYKKAFDSVPHSWLTKILQIYKINPGLRQFLAKTMKTWRTNIHLTTQDGHIQTEELHIRRGIFQGDSLSSLWFCLCLNPLSNALNNTNYGFNIRHQKVNQHRINHLLYMDDIKLYAATDVQLRELLRITEVYTSDVRMEFGMNKCKVLHINKGQWKNHPEQEIVTGQTLDNMDKEETYKYLGFNQSVKIDHTQIKAELRQVFRDRLIKLLKTKLNSRNLTKAINTFAIPILTYSFGIIKWSHTDIENIHILIRTELTKHRMSHPNACKERLTIDRTQGGRGITDIQSLRTRQIKTLRHFFQNKQTNLHRAIVKADKNYTALNLSCPDHVADTHNPTQSQQEKISTWSQKPLHGKHRYRVTQDHINKKQSYTWLQDGQLFPETEGFMLAIQDQVIATRNYKKYIMKDPSITDDNCRKCQQQKETIDHITSGCKTLAGTEYTARHNSAAKVIHQALATTNKLIENTDPYYNYTPTSVLENDQYKLYWDVQIHTDKTMPANRPDIVFQSKLDKVTYLVDIAIPNDVNIQNTYAGKISKYTDLAMEIKRLWKQDKVTIVPLIMSVSGLTPNTFTPHLQQLGLDEKLHKTFQKSVILKTCNIVRSFLNSDQ

SEQ ID NO: 32166 - protein, 1207 aa, Callosobruchus maculatus
MDRVNFINNQRRPRVRRLNSPEPQTEKEQPIGDNPAADVLPVEPATTKAGKPRQRLQWTTEMNTSVMHCYYTATKLETISTGYRHELHRLFTAQYPHLSERVTEQRLIDQKRVITKNNRLTPQQLQAIKNLVADEINTVETNDSLVNESITETQHDHTLNDKTPNTNTTNTTSTHLEENPKHEFIPDAPDTVCTNRPPTTTRNQNVTQTPSFTQSAEQVMNAQFNKWCGTNPTLRDPLPRLIFNSNTQKILHTINTNVIPQFLTSGSNLEDIHTVIYAAAAATLIVNGQKLPKRSNNHTSKRSKPKWQMRIENKITTIRKELAHLAQYTNNNNRSKRIQTTIDILKSKSPQKSIPEITDTLKQKLAVYAARLRRYNESNDRKDANNLFQKSEKQFYKKITTDNQITAIDLPSKQELTEFWGSLWSEPKTHNENAPWIRQEEEKHQHIAEQGNVILTPEEIAETIKHTHNWKCPGVDNIQNFWYKQFSSVYEVLTDQINKAILQPNRLPKFLTQGITYIKPKNADTKNPANYRPITCLPTLYKIITATICRRIEKHLTENSILTEEQKGCRKQSQGCKEQLIIDSVIMEQTRKEHRNLHTCFIDYKKAFDSVPHSWLTKTLQIYKINPGLRQFLTRTMETWRTNIHLQTEDGHIQTDELHIRRGIFQGDSLSSLWFCLCLNPLSNTLNSTNCGFTIRHQKANQHKINHLLYMDDLKLYAATEVQLRELLRITEVCTSDIKMEFGMSKCKVLHINKGQWKNHPEQEVVTGQALDNMDKDETYKYLGINQNAKIDHTKIKSQLTQEFKDRLIRLLKTKLNSKNLTKAINTFAIPILTYSFGIIKWSHTDIENIDILIRTELTKHRMSHPKACKERLTIDRKQGGRGIIDIQSLHAKQIKSLRHFFHSKQTNLHKAIVKADKNYTPLALSCPDHAADAHNHIQAQQEKINTWSQKALHGKHRYRVTQDHINEKQSYTWLQDGQLFPETEGFMLAIQDQVIATRNYRKYIMKDPSISDDNCRKCHQQKETIEHITSGCKTLAGTEYTARHNSAAKVIHQALATTNKLIENTDPYYNYTPTSVLENNQFKLYWDIEIHTDKTIPANRPDIVFQSKTDKVTYLIDIAIPNDMNIQNTYAGKISKYTDLAIEIKRLWKQNKVVIVPLIMSVSGLTPNTFTPHLQQLGLDEKLHKTFQKSVILKTCSIVRSFLNSE

SEQ ID NO: 32167 - protein, 1171 aa, Callosobruchus maculatus
MNSFIGFAACLSNNNNNKNTNIRYEYTKHFAGKISCDRNKTTLEAIQSYHCPPNYNNNNNEVNTVRQNDPQTSNTTTSDNTTIPTEIDPEHEHTQDRPDTAVQPNDSLAIESNTEGHTIHTRNNQPPNKDTTKDTSIHLEIDPEHDHAPHTPETTCSNLPSTATQSQNITLPPAITQSAKQVMNTQYNKWCGTNPVLRDPLPRLIFKNNTRQILHTINANIIPQFLTNDSDLEDIHTVIYAAAATTLIVNGQKLPKRSKNHTSKRSKPKWQIRIENKISTLRKDLAHVTQYTNNNNLSKRIQTTINRLKSKSPQQTIPEIADTLKQKLAVYAARLRRYNESNDRKDANNLFQKSEKQFYQKMTSNNQITTTEPPSRQELTEFWGSLWSEPKTHNENAPWIRQEEEKHQHIAEQGDVVFTPDEIAETIKHTHNWKCPGVDNVQNFWYKQFSATYEMLTEQINKAILQPNRLPKFLTQGITYIKPKNGDTRNPANYRPITCLPTLYKIITATIGKRIEQHLTQNNILTEEQKGCRKQSQGCKEQLIIDSVIMEQTRKEHRNLHTCFIDYKKAFDSVPHSWLTKTLQIYKINPVLRQFLTRTMETWRTNIHLKTQDGHIQTEELLIRRGIFQGDSLSSLWFCLCLNPLSNALNNTNYGFNTRHQKVNQHRINHLLYMDDIKLYAATEVQLKDLLRITEVCTSDVRMEFGMSKCKVLHINKGQWKNQSEQEILTGETLDNMDKDETYKYLGFNQNIKIDHTQAKAQLTQEFRNRLLKLLKSKLNSKNLTKAINTFAIPVLTYSFGIIKWSHTDIENIHILIRTELTKHRMSHPNACKERLTIDRKQGGRGIIDIQSLHTRQIKTLRDFFQSKQTNLHRSIVKADKNYTALNLSRSDHSADGHNHIELQQEKINTWSQKALHGKHRYRVTQEHINERQSYTWLQDGQLFPETEGFMLAIQDQVTATRNYMKYIIKDTSITDDNCRKCHQQKETIDHITSGCKTLAGTEYTARHNSAAKVIHQALATTNKLIENTDPYYNYTPTSVLENNEYKLYWDVEIHTDKTIPANRPDIVFQSKTDKVTYLIDIAIPNDTNIQNAYAGKISKYTDLAIEIKRLWKQNKVTIVPLIMSVSGLTPNTFTPHLQQLGLDEKLHKIFQKSVILKTCNIVRSFLNSDP

SEQ ID NO: 32168 - protein, 1049 aa, Callosobruchus maculatus
MEQQPGVSEPGLHFFALKKNNKNKRIQTTIDILKSKSPQKPQPHKAKTSLYHLPSHNLPNMKTQYNKWCGTNPVLRDPLPRLIFKNNTRQILHTMNANIIPQFLTNDSDLEDIHTVIYAAAATTLIVNGQKLPKRSKNHTSKRSKPKWQIRIENKISTLRKDLAHVTQYTNNNNLSKRIQTTINRLKSKSPQQTIPEIADTLKQKLAVYAARLRRYNESNDRKDANNLFQKSEKQFYQKMTSNNQITTTEPPSRQELTEFWGSLWSEPKTHNENAPWIRQEEEKHQHIAEQGDVVFTPDEIAETIKHTHNWKCPGVDNVQNFWYKQFSATYEMLTEQINKAILQPNRLPKFLTQGITYIKPKNGDTRNPANYRPITCLPTLYKIITATIGKRIEQHLTQNNILTEEQKGCRKQSQGCKEQLIIDSVIMEQTRKEHRNLHTCFIDYKKAFDSVPHSWLTKTLQIYKINPVLRQFLTRTMETWRTNIHLKTQDGHIQTEELLIRRGIFQGDSLSSLWFCLCLNPLSNALNNTNYGFNIRHQKVNQHRINHLLYMDDIKLYAATEVQLKELLRITEVCTSDVRMEFGMSKCKVLHINKGQWKNQSEQEILTGETLDNMDKDETYKYLGFNQNIKIDHTQVKAQLTQELRNRLLKLLKSKLNSKNLTKAINTFAIPVLTYSFGIIKWSHTDIENIHILIRTELTKHRMSHPNACKERLTIDRKQGGRGIIDIQSLHTRQIKTLRDFFQSKQTNLHRSIVKADKNYTPLNLSRSDHSADGHNHIELQQEKINTWSQKALHGKHRYRVTQEHINERQSYTWLQDGQLFPETEGFMLAIQDQVIATRNYMKYIIKDTSITDDNCRKCHQQKETIDHITSGCKTLAGTEYTARHNSAAKVIHQALATTNKLIENTDPYYNYTPTSVLENNEYKLYWDVEIHTDKTIPANRPDIVFQSKADKVTYLIDIAIPNDTNIQNAYAGKMSKYTDLAIEIKRLWKQNEVTIVPLIMSVSGLTPNTFTPHLQQLGLDEKLHKIFQKSVILKTCNIVRSFLNSDP

SEQ ID NO: 32169 - protein, 1098 aa, Callosobruchus maculatus
MYMCIIKNNRLTPQQLQAIKNLVADEISTVETNDSLVNESIMETQHDHTLNDKTPNTNTTNTTGTHLEENPEHEFIPDAPDTVCTNRPPTTTRNQNVTQTPSFTQSAEQVMNAQFNKWCGTNPALRDPLPRLIFNSNTQKILHTINTNVIPQFLTEDSNLEYIHTVIYAAAAATLIVNGQKLPKRSNNHRSKRSKPKWQMRIENKITTIRKELAHLAQYTNNNNRSKRIQTTIDILKSKSPQKSIPEITDTLKQKLAVYAARLRRYNESNDRKDANNLFQKSEKQFYKKITTDNQITAIELPNKQELTEFWGSLWSEPKTHNENAPWIRQEEEKHQHIAEQGDVILTPEEIAETIKHTHNWKCPGVDNIQNFWYKQFSSVYEVLIDQINKAILQPNRLPKFLTQGITYIKPKNADTKNPANYRPITCLPTLYKIITATICRRIEKHLTENSILTEEQKGCRKQSQGCKEQLIIDSVIMEQTRKEHRNLHTCFIDYKKAFDSVPHSWLTKTLQIYKINPGLRQFLTKTMETWRTNIHLQTEDGHIQTDELHIRRGIFQGDSLSSLWFCLCLNPLSNTLNSTNCGFTIRHQKANQHKINHLLYMDDLKLYAATEVQLRELLRITEVCTSDIKMEFGMSKCKVLHINKGQWKNHPEQEVVTGQALDNMDKNETYKYLGINQNAKIDHTKIKSQLTQEFKDRLIRLLKTKLNSRNLTKAINTFAIPILTYSFGIIKWSHTDIENIHILIRTELTKHRMSHPKACKERLTIDRKQGGRGIIDIQSLHAKQMKSLRHFFHSKQTNLHKAIVKADKNYTPLALSCPDHAADAHNHIKAQQEKINTWSQKALHGKHRYRVTQDHINEKQSYTWLQDGQLFPETEGFMLAIQDQVIATRNYRKYIMKDPSISDDNCRKCHQQKETIEHITSGCKTLAGTEYTARHNSAAKVIHQALATTNKLIENTDPYYNYTPTSVLENNQFKLYWDIEIHTDKTIPANRPDIVFQSKTDKVTYLIDIAIPNDMNIQNTYAGKISKYTDLAIEIKRLWKQNKVVIVPLIMSVSGLTPNTFTPHLQQLGLDEKLHKTFQKSVILKTCSIVRSFLNSE

SEQ ID NO: 32170 - protein, 938 aa, Callosobruchus maculatus
MDCTSSPINNINNNNMNIKLQKRSKDQRSNRAKPKWQIRIENKISTLRKDLAHLAQYSNNNNHPSKHIQRTINILKSKSPQKSIPEIADTFKQKLAVYAARLRRYNESNDRKDANNLFQKSEKQFYQKITSNNQITTIEPPSRQELTAFWRSLWSEPKTHNENAPWIRQEETKHQHITEQGNVILTTEEIAETIKHTHNWKCPGVDNVQNFWYKQLSSTYEMLTDQINKAILQPNRLPKFLTQGITYIKPKNADTKNPANYRPITCLPTLYKIITATICRRIEQHLMQNNILTEEQKGCRKHSQGCKEQLIIDSVIMEQTRKEHRNLHTCFIDYKKAFDSVPHSWLMKTLQIYKINPGLRQFLKSTMETWRTNIHLQTHDGHIQTDELHIRRGIFQGDSLSSLWFCLCLNPLSNTLNSTNHGFNIRHHRADQHKINHLLYMDDIKLYAATEVQLRELLKITEVYTSDIRMEFGMSKCKVLHINKGQWKNQPEKEVVTGQPLDNMDKDETYKYLGFNQNVKIDHTQVKAQLTQEFKDRLIKLLKTKLNSKNLTKAINTFAIPVLTYSFGIIKWSHTDIENIHILIRTELTKHRMSHPNACKERLAIDRKIGGRGIIDIQSLRTTQIQTLRHFFHTKQTTLHKAIVKADKNYTPLNLSSPDHVADTYNHIQSQQEKINTWSQKALHGKHRYRVTQDHINQKHSYAWLQDGQLFPETEGFMLAIQDQVIATRNYKKYIIKDPSITDDNCRKCQQQKETIDHITSGCKTLAGTEYTARHNSAAKVIHQALATTNKLIENTDPYYNYTPTSVLENDQYKLYWDVEIHTDKTIPANRPDIVFQSKADKITYLIDIAIPNDVNIQNTYAGKIPKYTDLAMEIKRLWKQNKVTIVPLIMSVSGLTPSTFTQHLQQLGLDEKLHKVFQKSVILKTCNIVRSFLNSDQ

SEQ ID NO: 32171 - protein, 1184 aa, Callosobruchus maculatus
MREELRKSDNNNNNNTTQPATTKAGKPRQRLQWTTEMNKSVMRCYYTATKLETISTGYRHELHRLFTTQYPHLSTRVTEQRLIDQKRVITKNNRLTPQELQDIKNLVSNEMNTVQPNDSLTTEQIVETQNSDTQTSQTSNTAKTNNTSIHSELGPEHDQALDTPDTTITNLPSTIIQIQNITRPFAVTQSVEQVMSTQYNKWCGTNPALRDPLPRLIFKNNTQQILHTVNANVIPQFIRDDSNLEDIHTVIYAAAATTLIVNGQKLSKRSKHQTSNRTKPKWQIRIENKISTIRKDLAHLAQYTINNNHPSRHIQRTINILKSKSPQQTTPEITDTLKQKLAVYAARLRRYNESNARKDANSLFQKSEKQFYQKITADNQITTIEPPSKQELTEFWGSLWSEPKTHNEDAPWIREEEEKHQHIAEQGDVILSKEEIVETIKHTHDWKCPGVDNVQNFWYKHFSSTYEVLTNQINKAIRQPDRFPKFLTQGITYIKPKNADTKNPANYRPITCLPTLYKIITATLCRRIEQHLTQNNILTEEQKGCRKQSQGCKEQLIIDSVIMEQTRKEHRNLHTCFIDYKKAFDSVPHSWLTKILQIYKINPGLRQFLAKTMKTWRTNIHLTTQDGHIQTEELHIRRGIFQGDSLSSLWFCLCLNPLSNALNNTNYGFNIRHQKVNQHRINHLLYMDDIKLYAATDVQLRELLRITEVYTSDVRMEFGMNKCKVLHINKGQWKNHPEQEIVTGQTLDNMDKEETYKYLGFNQSVKIDHTQIKAELRQVFRDRLIKLLKTKLNSRNLTKAINTFAIPILTYSFGIIKWSHTDIENIHILIRTELTKHRMSHPNACKERLTIGRTQGGRGITDIQSLRTRQIKTLRHFFQNKQTNLHRAIVKADKNYTPLNLSCPDHVADTHNPTQSQQEKISTWSQKPLPGKHRYRVTQDHINKKQSYTWLQDGQLFPETEGFMLAIQDQVIATRNYKKYIIKDPSITDDNCRKCQQQKETIDHITSGCKTLAGTEYTARHNSAAKVIHQALATTNKLIENTDPYYNYTPTSVLENDQYKLYWDVQIHTDKTIPANRPDIVFQSKLDKVTYLIDIAIPNDVNIQNTYAGKISKYTDLAMEIKRLWKQDKVTIVPLIMSVSGLTPNTFTPHLQQLGLDEKLHKTFQKSVILKTCNIVRSFLNSDQ

SEQ ID NO: 32172 - protein, 1207 aa, Callosobruchus maculatus
MDRVNFINNQRRPRVRRLNSPEPQTEKEQPIGDNPVADVLPVEPATTKAGKPRQRLQWTTEMNTSVMHCYYTATKLETISTGYRHELHRLFTAQYPHLSARVTEQRLIDQKRVITKNNRLTPQQLQAIKNLVADEINTVETNDSLVNESITETQHDHTLNDKTPNTNTTNTTSTHLEENPEHEFIPDAPDTVCTNRPPTTTRNQNVTQTPSLTQSAEQVMNAQFNKWCGTNPTLRDPLPRLIFNSNTQKILHTINTNVIPQFLTSGSNLEDIHTVIYAAAAATLIVNGQKLPKRSNNHTSKRSKPKWQMRIENKISTIRKELAHLAQYTNNNNRSKRIQTTIDILKSKSPQKLIPEITDTLKQKLAVYAARLRRYNESNDRKDANNLFQKSEKRFYKKITTDNQVTAIELPSKQELTEFWGSLWSEPKTHNENAPWIRQEEEKHQQIAEQGDVILTPEEIAETIKHTHNWKCPGVDNIQNFWYKQFSSVYEVLTDQINKAILQPNRLPTFLTQGITYIKPKNADTKNPANYRPITCLPTLYKIITATICRRIEKHLTENNILTEEQKGCRKQSQGCKEQLIIDSVIMEQTRKEHRNLHTCFIDYKKAFDSVPHSWLTKTLQIYKINPGLRQFLTRTMETWRTNIHLQTEDGHIQTDELHIRRGIFQGDSLSSLWFCLCLNPLSNTLNSTNCGFTIRHQKANQHKINHLLYMDDLKLYAATEVQLRELLRITEVCTSDIKMEFGMSKCKVLHINKGQWKNHPEQEAVTGQALDNMDKDETYKYLGINQNAKIDHTKIKSQLTQEFKDRLIRLLKTKLNSKNLTKAINTFAIPILTYSFGIIKWSHTDIENIHILIRTELTKHRMSHPKACKERLTIDRKQGGRGIIDIQSLHAKQIKSLRHFFHSKQTNLHKAIVKADKNYTPLALSCPDHAADAHNHIQAQQEKINTWSQKALHGKHRYRVTQDHINEKQSYTWLQDGQLFPETEGFMLAIQDQVIATRNYRKYIMKDPSISDDNCRKCHQQKKTIEHITSGCKTLAGTEYTARHNSAAKVIHQALATTNKLIENTDPYYNYTPTSVLENNQFKLYWDIEIHTDKTIPANRPDIVFQSKTDKVTYLIDIAIPNDMNIQNTYAGKISKYTDLAIEIKRLWKQNKVVIVTLIMSVSGLTPNTFTPHLQQLGLDEKLHKTFQKSVILKTCSIVRSFLNSE

SEQ ID NO: 32173 - protein, 1245 aa, Callosobruchus maculatus
MHRVSSKNNQRRPRVRRLNSPEPQTQTEQPIERNPAADVLPAQPATTKAGKPRQRLQWTTEINKSVMRCYYTATKLETISTGYRHELHRLFIAQYPHLAERVTEQRLIDQKRVITKNNRLTPEELQAIKILVSNEINTPNQNDPQTSNTATSDNTTIATETDPAHEHTQDRPDNAIQPDDSLAIESITEGHTIHTRNNQPPNKDTTNNTSIHFEIDPEHNHAPHTPETTCTNLPSTAIQSQNITLPPAIIQSAKQVMNTQYNKWCGTNPALRDPLPRLIFKNNTRQILHTINTNIIPQFLTNDSDLEDIHTVIYAAAATTLIVNGQKIPQRSKTHTSKRSKPKWQIRIENKISTLRKDLAHLTQYTNNNNLSKRIQTTINRLKSKSPQQTIPEIADTLKQKLAVYAARLRRYNESNDRKDTNNLFQKSEKQFYQKMTSNNQITTTEPPSRQELTEFWGSLWSEPKTHNENAAWIRQEEEKHQHIAEQGDIVLTPEEIAETIKHTHNWKCPGVDNVQNFWYKQFSATYEMLTEQINKAILQPNRLPKFLTQGITYIKPKNADTRNPANYRPITCLPTLYKIITATIGKRIEQHLTQNNILTEEQKGCRKQSQGCKEQLIIDSVIMEQTRKEHRNLHTCFIDYKKAFDSVPHSWLKKTLQIYKINPVLCQFLTRTMETWRTNIHLKTQDGHIQTDELLIRRGIFQGDSLSSLWFCLCLNPLSNALKNTNYGFNIRHQKVNQHRINHLLYMDDIKLYAATEVQLKELLRITEVCTSDVRMEFGMSKCKVLHINKGQWKNQSEQEILTGQTLDNMDKDETYKYLGFNQNIKIDHTQVKAQLTQEFRYRLVKLLKSKLNSKNLTKAINTFAIPVLTYSFGIIKWSHTDIENIHILIRTELTKHRMSHPNACKERLTIDRKQGGRGIIDIQSLRARQIKTLRHFFQSKQTNLHRAITKADKSYTPLNLSSPDHAADTHNLIQSQQEKINTWSQKPLHGKHRYRITQDQINEKQSYTWLQDGQLFPETEGFMLAIQDQVIATRNYKKYVIKDPSITNDNCRKCHQQKETIDHITSACKTLAGTEYTARHNSAAKIIHQALATKNKLIDNSDPYYKYTPTSVLDSDHYKLYWDVEIHTDKTINANRPDIVFQTKADKVTYLIDIAIPNDVNVQNTYAGKISKYTDLAIEVKRLWKQNKVIIVPLIMSVSGLTPNTFTQHLQQLGLDEGLHKTFQKSVILKTCNIVRSFLNSDQ

SEQ ID NO: 32174 - protein, 901 aa, Callosobruchus maculatus
MANANRKQNYHNQKGTGTPRTIHLQQQPFKTHTDNNRYPQIQVPQKSIPEITDTLKQKLAVYAARLRRYNESNDRKDANNLFQKSEKQFYKKITTDNQITATELPSKQELTEFWGSLWSEPKTHNENAPWIRQEEEKHQHIAEQGNVILTPEEIAETIKHTHNWKCPGVDNIQNFWYKQFSSVYEVLTDQINKAILQPNRLPKFLTQGITYIKPKNADTKNPANYRPITCLPTLYKIITATICRRIKKHLTENSILTEEQKGCRKQSQGCKEQLIIDSVIMEQTRKEHRNLHTCFIDYKKAFDSVPHSWLTKTLQIYKINPGLRQFLTRTMETWRTNIHLQTEDGHIQTDELHIRRGIFQGDSLSSLWFCLCLNPLSNTLNSTNCGFTIRHQKANQHKINHLLYMDDLKLYAATEVQLRELLRITEVCTSDIKMEFGMSKCKVLHINKGQWKNHPEQEVVTGQALDNMDKDETYKYLGINQNAKIDHTKIKSQLTQEFKDRLIRLLKTKLNSRNLTKAINTFAIPILTYSFGIIKWSHTDIENIHILIRTELTKHRMSHPKACKERLTIDRKQGGRGIIDIQSLHAKQIKSLRHFFHSKQTNLHKAIVKADKNYTPLALSCPDHAADTHNHIQAQQEKINTWSQKALHGKHRYRVTQDHINEKQSYTWLQDGQLFPETEGFMLAIQDQVIATRNYKKYIMKDPSISDDNCRKCHQQKETIEHITSGCKTLAGTEYTARHNSAAKVIHQALATTNKLIENTDPYYNYTPTSVLENNQFKLYWDIEVHTDKTIPANRPDIVFQSKTDKVTYLIDIAIPNDMNIQNTYAGKISKYTDLAIEIKRLWKQNKVVIVPLIMSVSGLTPNTFTPHLQQLGLDEKLHKTFQKSVILKTCSIVRSFLNSE

SEQ ID NO: 32175 - protein, 1176 aa, Callosobruchus maculatus
MDKVSFSNNQRRPRVRRLNSPEQSQTQQPIAHNPTADVLPVQPATTKAGKPRQRLQWTTEMNKSVMHCYYTATRLETISTGYRHELYRLFTAQYPHLSTRVTEQRLIDQKRVITKNNRLTPQELQAIKNLVSNEINTVAPNDSLAEESITERQNNPTGSNQTPNTDTTNNTSIHLDVESEHEHIPDTPDQTSINLPSTATQSQNVTPPPCITQSTEQVMNTQYNKWCGTNPTLRDPLPRLIFKNNTRQILQTVNSNIIPQFLTKDSNLEDIHTVIYAAAATTLIVNGQKLPKRSKDHTSKRSKPKWQIRIENKISTIRKDLAHVTQYIHKNNLSKRIQTTISRLKSRSPQQTISEIYDTLKQKLAVYAARLRRYNESNDRKDTNNLFQKSERQFYQKITSNNQITTIEPPSRKELTDFWGSLWSEPKTHNENAPWIRQEEENQQHIPEQGDVILTPQEIEETIKHTHNWKCPGVDNVQNFWYKQFSATYEVLTDQINKAILQPNRLPKFLTQGVTYIKPKNADTKNPANYRPITCLPTLYKIITATIGKRIEQHLTQNNILTEEQKGCRKQSQGCKEQLIIDSVIMEQTRKEHRNLHTCFIDYKKAFDSVPHSWLTKTLQIYKINPTLRQFLTRIMETWRTNIHLKTQDGHIQTEELYIRRGIFQGDSLSSLWFCLCLNPLSNALNSTNYGFNIRHQKVNQHRISHLLYMDDIKLYAATEVQLKELLKITEVCTSDVRMEFGMSKCKVLHIHKGQWKNHSEQEILTGETLDNMEKDETYKYLGFNQNIKIDHSEVKAQLTQEFRDRLITLLKTKLNSKNLTKAINTFAIPVLTYSFGIIKWSHTDIENINILIRTELTKHRMSHPKACKERLTIDRKHGGRGIIDIQSLHTRQIKTLRDFFQSKETNLHRSIVKADKNYTPLTLSRPDHPADAHNHIELQQEKINTWSQKALHGKHRYRVTQDHINERQSYTWLQDGQLFPETEGFMLAIQDQVIATRNYMKYIIKDTSITDDNCRKCHQQKETIDHITSACKTLAGTEYTARHNSAAKVIHQALATTNKLIENTDPYYNYTPTSVLENNEYKLYWDVEIHTDKTIPANRPDIVFQSKADKVTYLIDIAIPNDTNIQNAYAGKISKYTDLAIEIKRLWKQNKVTIVPLIMSVSGLTPNTFHHTYNS

SEQ ID NO: 32176 - protein, 989 aa, Callosobruchus maculatus
MNTQYNKWCGTNPTLRDPLPRLIFKNNTLQILHTINVNIIPQFLTKDSDLEDIHTVIYAAAATTLTLNGQKIPKRSIARTNERSKPKWQIRIENKISTIRKDLAHLAQYTNNNNRSKRIQTTINILKSKSPQQTISEIADTLKQKLAVYAARLRRYNESNARKDANNLFQKSEKQFYQKITADNQITAIEPPSKQELTEFWGSLWSEPKTHNENAPWIRQEEEKHQHIVEQGDVILTPEEIAETIKHTHNWKCPGVDNVQNFWYKQFSATYEMLTDQINKAILQPNRLPKFLTQGITYIKPKNAETKNPANYRPITCLPTLYKIITSTICRRIEQHLTQNNILTEEQKGCRKQSQGCKEQLIIDNVIMEQTRKEHRNLHTCFIDYKKAFDSVPHSWLAKTLQIYKINPGLREFLTRTMETWRTSIHLKTQNDHIKTDELHIRRGIFQGDSLSSLWFCLCLNPLSNTLNNTNCGFNIRHDKLNQHKINHLLYMDDIKLYAANEVQLRELNRITGACSSDVRMEFGLSKCKVLHINKGQWKDHPQQETVTGQTLNSMSKDETYKYLGFNQNVKIDHTQVKAQLTQQFRDGLIKLLKSKLNSRNLTKAINTFAIPVLTYSFGIIKWSHTDIENIHILIRTELTKHRMSHPNACKERLTIDRTQGGRGITDIQSLRTRQIKTLRHFFQNKQTNLHRAIVKADKNYTPLNLSCPDHVADTHNPAQSQQEKISTWSQKPLHGKHRYRVTQDHINKKQSYTWLQDGQLFPETEGFMLAIQDQVIATRNYKKYIIKDPSITDDNCRKCQQQKETIDHITSGCKTLAGTEYTARHNSAAKVIHQALATTNKLIENTDPYYNYTPTSVLENDQYKLYWDVEIHTDKTIPANRPDIVFQSKADKITYLIDIAIPNDVNIQNTYAGKISKYTDLAIEIKRLWKQNKVTIVPLIMSVSGLTPNTFTQHLQQLGLDEKLHKVFQKSVILKTCNIVRSFLNSDQ

SEQ ID NO: 32177 - protein, 1191 aa, Callosobruchus maculatus
MDRVNFINNQRRPRVRRLNSPEPQTEKEQPIGDNPVADVLPVEPATTKAGKPRQRLQWTTEMNTSVMHCYYTATKLETISTGYRHELHRLFTAQYPHLSARVTEQRLIDQKRVITKNNRLTPQQLQAIKNLVADEINTVETNDSLVNESITETQHDHTLNDKTPNTNTTNTTSTHLEENPEHEFIPDAPDTVCTNRPPTTTRNQNVTQTPSFTQSAEQVMNAQFNKWCGTNPALRDPLPRLIFNSNTQKILHTINTNVIPQFLTSGSNLEDIHTVIYAAAAATLIVNGQKLPKRSNNHTSKRSKPKWQMRIENKITTIRKELAHLAQYTNNNNRSKRIQTTIDILKSKSPQKSIPEITDTLKQKLAVYAARLRRYNESNDRKDANNLFQKSEKQFYKKITTDNQITAIELPSKQELTEFWGSLWSEPKTHNENAPWIRQEEEKHQHIAEQGNVILTPEEIAETIKHTHNWKCPGVDNIQNFWYKQFSSVYEVLTDQINKAILQPNRLPKFLTQGITYIKPKNADTKNPANYRPITCLPTLYKIITATICRRIEKHLTENSILTEEQKGCRKQSQGCKEQLIIDSVIMEQTRKEHRNLHTCFIDYKKAFDSVPHSWLTKTLQIYKINPGLRQFLTRTMETWRTNIHLQTEDGHIQTDELHIRRGIFQGDSLSSLWFCLCLNPLSNTLNSTNCGFTIRHQKANQHKINHLLYMDDLKLYAATEVQLRELLRITEVCTSDIKMEFGMSKCKVLHINKGQWKNHPEQEVVTGQALDNMDKDETYKYLGINQNAKIDHTKIKSQLTQEFKDRLIRLLKTKLNSRNLTKAINTFAIPILTYSFGIIKWSHTDIENIHILIRTELTKHRMSHPKACKERLTIDRKQGGRGIIDIQSLHAKQIKSLRHFFHSKQTNLHKAIVKADKNYTPLALSCPDHAADAHNHIQAQQEKINTWSQKALHGKHRYRVTQDHINEKQSYTWLQDGQLFPETEGFMLAIQDQVIATRNYRKYIMKDPSISDDNCRKCHQQKETIEHITSGCKTLAGTEYTARHNSAAKVIHQALATTNKLIENTDPYYNYTPTSVLENNQFKLYWDIEIHTDKTIPANRPDIVFQSKTDKVTYLIDIAIPNDMNIQNTYAGKISKYTDLAIEIKRLWKQNKVVIVPSLCRSQALLQIHLRHTCNNWAWMKSYIKPSKSL

SEQ ID NO: 32178 - protein, 622 aa, Callosobruchus maculatus
MEQTRKEHRNLHTCFIDYKKAFDSVPHSWLTKILQIYKINPGLRQFLAKTMKTWRTNIHLTTQDGHIQTEELHIRRGIFQGDSLSSLWFCLCLNPLSNALNNTNYGFNIRHQKVNQHRINHLLYMDDIKLYAATDVQLRELLRITEVYTSDVRMEFGLNKCKVLHINKGQWKNHPEQEIVTGQTLDNMDKEETYKYLGFNQSVKIDHTQIKAELRQVFRDRLIKLLKTKLNSRNLTKAINTFAIPILTYSFGIIKWSHTDIENIQILIRTELTKHRMSHPNACKERLTIDRTQGGRGITDIQSLRTRQIKTLRHFFQNKQTNLHRAIVKADKNYTPLNLSCPDHVADTHNPTQSQQEKISTWSQKPLHGKHRYRVTQDHINKKQSYTWLQDGQLFPETEGFMLAIQDQVIATRNYKKYIIKDPSITDDNCRKCQQQKETIDHITSGCKTLAGTEYTARHNSAAKVIHQALATTNKLIENTDPYYNYTPTSVLENDQYKLYWDVQIHTDKTIPANRPDIVFQSKLDKVTYLIDIAIPNDVNIQNTYAGKISKYTDLAMEIKRLWKQDKVTIVPLIMSVSGLTPNTFTPHLQQLGLDEKLHKTFQKSVILKTCNIVRSFLNSDQ

SEQ ID NO: 32179 - protein, 1209 aa, Callosobruchus maculatus
MDRVNFMNNQRRPRVRRLNSPEPQTQTEQPIEHNPAADVLPTQPATTKAGKPRQRFQWTTEMNKSVMRCYYTATKLETISTGYRHELHRLFTTQYPHLSTRVTEQRLIDQKRVITKNNRLTPQELQDIKNLVSNEMNIVQPNDSLTTEQIVETQNSDTQTSQTSNTAKTNNTSIHSELGPEHDQALDTPDTTITNLPSTIIQIQNITRPFAVTQSVEQVMSTQYNKWCGTNPALRDPLPRLIFKNNTQQILHTVNANVIPQFIRDDTNLEDIHTVIYAAAATTLIVNGQKLSKRSKHQTSNRTKPKWQIRIENKISTIRKDLAHLAQYTINNNHPSRHIQRTINILKSKSPQQTIPEITDTLKQKLAVYAARLRRYHESNARKDANSLFQKSEKQFYQKITADNQITTIEPPSKQELTEFWGSLWSEPKTHNEDAPWIREEEEKHQHIAEQGDVILSKEEIVETIKHTHDWKCPGVDNVQNFWYKHFSSTYEVLTNQINKAIRQPDRLPKFLTQGITYIKPKNADTKNPANYRPITCLPTLYKIITATLCRRIEQHLTQNNILTEEQKGCRKQSQGCKEQLIIDSVIMEQTRKEHRNLHTCFIDYKKAFDSVPHSWLTKILQIYKINPGLRQFLAKTMKTWRTNIHLTTQDGHIQTEELHIRRGIFQGDSFSSLWFCLCLNPLSNALNNTNYGFNIRHQKVNQHRINHLLYMDDIKLYAATDVQLRELLRITEVYTSDVRMEFGMNKCKVLHINKGQWKNHPEQEIVTGQTLDNMDKEETYKYLGFNQSVKIDHTQIKAELRQVFRDRLIKLLKTKLNSRNLTKAINTFAIPILTYSFGIIKWSHTDIENIHILIRTELTKHRMSHPNACKERLTIDRTQGGRGITDIQSLRTRQIKTLRHFFQNKQTNLHRAIVKADKNYTALNLSCPDHVAETHNPTQSQQEKISTWSQKPLHGKHRYRVTQDHINKKQSYTWLQDGQRFPETEGFMLAIQDQVIATRNYKKYIMKDPSITDDNCRKCQQQKETIDHITSGCKTLAGTEYTARHNSAAKVIHQALATTSKLMENTDPYYNYTPTSVLENDQYKLYWDVQIHTDKTIPANRPDIVFQSKLDKVTYLIDIAIPNDVNIQNTYAGKISKYTDLAMEIKRLWKQDKVTIVPLIMSVSGLTPNTFTPHLQQLGLDEKLHKVFQKSVILKTCNIVRSFLNSDQ

SEQ ID NO: 32180 - protein, 1241 aa, Callosobruchus maculatus
MHKVTSKNNQRRPRVRRLNSPEPQAQTEQPIERNPAADVLPAQMATTKAGKPRQRLQWTTEINKSVMHCYYTATKLETISTGYRHELRRLFIAQYPHLAERVTEQRLIDQKRVITKNNRLTPEELQAIKVLVSSEMNTAHPNDPQTSNTTTTDNTSIHLEIDPEHEHTQDIPDTAVQPNDSLAIETITEGHAIHSRNNQPPNKDTTNNTSIHLEIDPEHDHTPETTCTNLPSTTTQNQNITIPAVITQSAEQVMYTQYNKWCGTNPVLRDPLPRLIFKNYTRQILHTINANIIPQFLTNDSDLEDIHTVIYAAAATTLIVNGQKLPKRSKNHTNKRSKPRWQIRIENKISALRKDLAHLTQYTNNNNLSKRIQTTIDRLKSKSPQQTIPEIADTLKQKLAVYAARLRRYNESNDRKDANNLFQKSEKQFYQKITSTTQITTIEPPTRQELTEFWGNLWSEAKTHNDNAPWIRQEEEKQQHIPEQGDVILTPQEIAETIKHTHNWKCPGVDNVQNFWYKQFTATYELLTNQINKALLQPNRLPKFLTQGITYIKSKNADTKNPANYRPITCLPTLYKIITATIGKRIEQHLTQNSILTEEQKGCRKQSQGCKEQLIIDSVIMEQTRKEHRNLHTCFIDYKKAFDSVPHSWLKKTLGIYKINPGLRQFLTRTMETWRTNIYLQTEDGHIQTDELHIRRGIFQGDSLSSIWFCLCLNPLSNTLNDTNCGFTIRHQKVNLHKINHLLYMDDIKLYAATEAQLRELLRIPEVCTSDMRMEFGMSKCKVLHINKGQWKNHPEQEVVTGQMLDNMDKDETYKYLGFSQNVKIDHTQVKAQLTREFKDRLTRLLKTKLNSRNITKAINTFAIPVLTYSFGIIKWSHTDIENIHILIRTEFTKHRMSHPNACKERLTIDRKQGGRGIIDIHSLHTKQIKTLRYFFHSKQTNLHKAIVKADKNYTPLALSCPDHAADAHNHIQSQQEKINTWSQKALHGKHRYRVTQDHINKNQSYTWLQDGQLFPETEGFMLAIQDQVIATRNYKKYIIKDPSITDDSCRKCHQQKETIEHITSGCKTLAGTKYTARHNSAAKVIHQALATTNKLTENTDPYYNYTPTSVLENNKFKLYWDIEIHTDKTIPANRPDIVFQSKADKVTYLIDIAIPNDMNIQNTYTGKISKYTDLAIEIKRLWKQNKVIIVPLIMSVSGLTPNTFTPHLQQLGLDEKLHKTFQKSVILKTCSIVRSFLNSE

SEQ ID NO: 32181 - protein, 1208 aa, Callosobruchus maculatus
MDKVSFSNNQRRPRVRRLNSPEPQNQTPQPIAHNPTADVLSVQPATTKAGKPRQRLQWTTEMNKSVMHCYYTATKLETISTGYRHELHRLFTAQYPHLSTRVTEQRLIDQKRVITKNNHLTPQELQAIKSLVSNKINTVPPNDSLADESTTERQNIHSQNSQTPNTDTTNDTSIHSDMDSEHEHIPDTPDQTSINLPLTATQSQKVTPPPSITQSTEQVMDTQYNKWCGTNPALRDPLPRLIFKNNTQQILHTINSNIIPQFLTNVSNLEDIHTVIYAAAATTLTVNGQKLPKRSKDHTSNRPKPKWQIRIENKISAIRKDLAHLAQYTINNNRSKRIQTTIDILKSKSPQKSIPEIADTLKQKLAVYAARLRRYNESNERKNANNLFQKSEKQFYQKITTNNQEATIEPPSRQDLTEFWSSLWSEPKTHNQDAPWIRQEEEKHQHIMEQGDVILTPEEIAETIKHTHNWKCPGVDNIQNFWYKQFSSTYEVLTDQINKAILQPNRLPKFLTQGITYIKPKNTDTKNPANYRPITCLPTLYKIITATICRRIEQHLTQNNILTEEQKGCRKQSQGCKEQLIIDSVIMEQTRKEHRNLHTCFIDYKKAFDSVPHSWLKKTLQIYKINSGLRQFLTRIMETWRTNIHLKTQHGHIQTDELHIRRGIFQGDSLSSLWFCLCLNPLSNALNNTNCGFNIRHEKVNQHKINHLLYMDDIKLYAATEVQLRELLRITEVCTSDVRMEFGMSKCKVLHINKGQWKSHQERETLTGQTLDNMDKGETYKYLGFNQSVKIDHSQVKEQLIQEFRDRLIKLLKTKLNSRNLTKAINTFAIPVITYSFGIIKWSHTDIENIQILIRTELTRHRMSHPNACKERLTIDRKQGGRGIIDIQSLRTKQIKTLRHFFHSKQTNLHRAIVKADKNYTPLTLSSPNHAADTHNPIELQQEKINTWSQKALHGKHRYRITQDHINEKQSYTWLQDGQLFPETEGFMLAIQDQVIATRNYKKYIIKDPSVTNDNCRKCHQQKETIDHITSACKTLAGTEYTARHNSAAKIIHQALATTNKLIENTAPYYNYTPTSVLDNNHYKLYWDVEIHTDKTIPANRPDIVFQSKADKVTYLIDIAIPNDTNVQTAYAGKISKYTDLAIEVKRLWKQNKVVIVPLIMSVSGLTPNTFTPHLHQLGLDEKLHKIFQKSVILKTCNIVRSFLNSDQ

SEQ ID NO: 32182 - protein, 1209 aa, Callosobruchus maculatus
MDRVNFMNNQRRPRVRRLNSPEPQTQTEQPIEHNPAADVLPTQPATTKAGKPRQRLQWTTEMNKSVMRCYYTATKLETISTGYRHELHRLFTTQYPHLSTRVTEQRLIDQKRVITKNNRLTPQELQDIKNLVSNEMNIVQPNDSLTTEQIVETQNSDTQTSQTSNTAKTNNTSIHSQLGPEYDQALDTPDTTITNLPSTIIQIQNITRPFAVTQSVEQVMSTQYNKWCGTNPALRDPLPRLIFKNNTQQILHTVNANVIPQFIRDDSNLEDIHIVIYAAAATTLIVNGQKLSKRSKHQTSNRTKPKWQIRIENKISTIRKDLAHLAQYTINNNHPSRHIQRTINILKSKSPQQTIPEITDTLKQKLAVYAARLRRYNESNARKDANSLFQKSEKQFYQKITADNQITTIEPPSKQELTEFWGSLWSEPKTHNEDAPWIREEEEKHQHIAEQGDVILSKEEIVETIKHTHDWKCPGVDNVQNFWYKHFSSTYEVLTNQINKAIRQPDRLPKFLTQGITYIKPKNADTKNPANYRPITCLPTLYKIITATLCKRIEQHLTQNNILTEEQKGCRKQSQGCKEQLIIDSVIMEQTRKDHRNLHTCFMDYKKAFDSVPHSWLTKILQIYKINPGLRQFLAKTMKTWRTNIHLTTQDGHIQTEELHIRRGIFQGDSLSSLWFCLCLNPLSNALNNTNYGFNIRHQKVNQHRINHLLYMDDIKLYAATDVQLRELLRITEVYTSDVRMEFGMNKCKVLHINKGQWKNHPEQEIVTGQTLDNMDKEETYKYLGFNQSVKIDHKQIKAELRQVFRDRLIKLLKTKLNSRNLTKAINTFAIPILTYSFGIIKWSHTDIENIHILIRTELTKHRMSHPNACKERLTIDRTQGGRGIIDIQSLRTRQIKTLRHFFQNKQTNLHRAVVRADKNYTPLNLSCPDHVADTHNPTQSQQEKISTWSQKPLHGKHRYRATQDHINKKQSYTWLQDGQLFPETEGFMLAIQDQVIATRNYKKYIIKDPSITDDNCRKCQQQKETIDHITSGCKSLAGTEYTARHNSAAKVIHQALATTNKLIENTDPYYNYTPTSVLENDQYKLYWDVQIHTDKTIPANRPDIVFQSKLDKVTYLIDIAIPNDVNIQNTYAGKISKYTDLAMEIKRLWKQDKVTIVPLIMSVSGLTPNTFTPHLQQLGLDEKLHKTFQKSVILKTCNIVRSFLNSDQ

SEQ ID NO: 32183 - protein, 1245 aa, Callosobruchus maculatus
MRRVTPKNNQRRPRVRRLNSPKPQTQTEQPIERNPAADVLPAQPATTKAGKPRQRLQWTTEINKSVMHCYYTATKLETISTGYRHELHRLFIAQYPHLAERVTEQRLIDQKRVITKNNRLTPEELQAIKILVSNEINTPHQNDPQTSNTTTSDNTTIPTEIDPEHEHTQDIPDNAVQPNDSLAIESITEGHTIHTQNNQPPNKDTTNNTSIHFEIDPEHNHAPDTPETTCTNLPSTATQSQNITLPPAITQSAKQVMNTQYNKWCGTNPVLRDPLPRLIFKNNTRQILHTINANIIPQFLTNDSDLEDIHTVVYAAAATTLIVNGQKLPQRSKTQTSKRSKPKWQIRIENKISTLRKDLAHLTQYTNNNNLSKRIQTTRNRLKSKSPQQTIPEIADTLKQKLAVYAARLRRYNESNDRKDANNLFQRSEKQFYQKMTSNNQITTTEPPSRQELTEFWGSLWSEPKTHNENAAWIRQEEEKHQHIAEQGDIVLTPEEIAETIKHTHNWKCPGVDNVQNFWYKQFSATYEMLTEQINKAILQPNRLPKFLTQGITYIKQKNADTRNPANYRPITCLPTLYKVITATIGKRIEQHLTQNNILTEEQKGCRKQSQGCKEQLIIDSVIMEQTRKEHRNLHTCFIDYKKAFDSVPHSWLKKTLQIYKINPVLRQFLTRTMETWRTNIHLKTQDGHIQTEELLIRRGIFQGDSLSSLWFCLCLNPLSNALNNTNYGFNIRHQKVNQHRINHLLYMDDIKLYAATEVQLKELLRITEVCTSDVRMEFGMSKCKVLHINKGQWQNQAEQEILTGQTLDNMDKDETYKYLGFNQNIKIDHTQVKAQLTQQFRDRLVKLLKSKLNSKNITKAINTFAIPVLTYSFGIIKWSHTDIENIHILIRTELTKHRMSHPNACKERLTIDRKQGGRGIIDIQSLRARQIKTLRQFFQSKQTNLHRAIAKADKSYTPLNLSCLDHAADTHNPIQSQQEKINTWSQKPFHGKHRYRITQDQINEKQSYTWLQDGQLFPETEGFMLAIQDQVIATRNYKKYVIKDPSITNDNCRKCHQQKETIDHITSACKNLAGTEYTARHNSAAKIIHQALATKNKLIDNSDPYYKYTPTSVLDNDHYKLYWDVEIHTDKTINANRPDIVFQTKADKVTYLIDIAIPNDVNVQNTYAGKISKYTDLAIEVKRLWKQDKVIIVPLIMSVSGLTPNTFTQHLQQLGLDEGLHKIFQKSVILKTCNIVRSFLNSDQ

SEQ ID NO: 32184 - protein, 1260 aa, Callosobruchus maculatus
MDKVSFSNNQRRPRVRRLNSPEPQSQTQQPIAHNPTADVLPVQPATTKAGKPRQRLQWTTEMNKFVMRCYYTATKLETISTGYRHELHRLFIAQYPHLAERVTEQRLIDQKRVITKNNRLTPQELQAVKKLVANEINTVHPIDSLVTESITETQNIHTRNNQTTNTAKTNNISIQSEIDSEHEHTPNTPDTTFTNLPATTTESQQISQPPSVTQSAEAVNTAQPPSISGEPEQMTNSRTTQFNKRCNTTTQNQNQNIARSPSITQTAEQVMNTQFNKWCGTNPALRDHLPRLIFKNNTQQILHTINTNLIPQFITNNSNLEDIHTVIYAAAATTLIVNGQKLQKRSKDQRSNRAKPRWQIRIENKISTLRKDLAHLAQYSNNNNHPSKHIQRTINIMKSKSPQKSIPEIADTLKQKLAVYAARLRRYNESNDRKDANNLFQKSEKQFYQKITSNNQITTIEPPSRQELTAFWRSLWSEPKTHNENAPWIRKEETKHQHITEQGNVILTTEEIAETIKHTHNWKCPGVDNVQNFWYKQFSSTYEMLTDQINKAILQPNRPPKFLTQGITYIKPKNADTKNPANYRPITCLPTLYKIITATICRRIKQHLTQNNILTEEQKGCRKHSQGCKEQLIIDSVIMEQTRKEHRNLHTCFIDYKKAFDSVPHSWLMKTLQIYKINPGLRQFLKSTMETWRTNIHLQTHDGHIQTDELHIRRGIFQGDSLSSLWFCLCLNPLSNTLNSTNHGFNIRHHKADQHKINHLLYMDDIKLYAATEVQLRELLKITEVYTSDIRMEFGMSKCKVLHINKGQWKNQPEKEVVTGQPLDNMDKDETYKYLGFNQNVKIDHTQVKAQLTQEFKDRLIKLLKTKLNSKNLTKAINTFAIPVLTYSFGIIKWSHTDIENIHILIRTELTKHRMSHPNACKERLAIDRKLGGRGIMDIQSLRTTQIQTLRHFFHTKQTNLHKAIVKADKNYTPLNLSSPDHVADTYNHIQSQQEKINTWSQKALHGKHRYRVTQDHINQKQSYAWLQDGQLFPETEGFMLAIQDQVIATRNYKKYIIKDPSITDDNCRKCQQQKETIDHITSGCKTLAGTEYTARHNSAAKVIHQALATTNKLRENTDPYYNYTPTSVLENDQYKLYWDVEIHTDKTIPANRPDIVYQSKADKITYLIDIAIPNDVNIQNTYAGKISKYTDLAMEIKRLWRQNKVTIVPLIMSVSGLTPSTFTQHLQQLGLDEKLHKVFQKSVILKTCNIVRSFLNSDQ

SEQ ID NO: 32185 - protein, 1199 aa, Callosobruchus maculatus
MNKFVMRCYYTATKLETISTGYRHELHRLFIAQYPHLAERVTEQRLIDQKRVITKNNRLTPQELQAVKKRVAKEINTVHPIDSLVTESITETQNIHTRNNQTTNTATTNNISIQSEIDSEHEHTPNTPDITFTNLPATTTQSQQISQPRSVTQSAEAVNTAQPPSISGEPEQMTNSRTTQFNKRCNTTTQNQNQNIARSPSITQTAEQVMNTQFNKWCGTNPALRDPLPRLIFKNNTQQILHTINTNLIPQFITNNSNLEDIHTVIYAAAATTLIVNGQKLQKRSKDQRSNRAKPKWQIRIENKISTLRKDLAHLAQYSNNNNHPSKHIQRTINILKSKSPQKSIPEIADTLKQKLTVYAARLRRYNESNDRKDANNLFQKSEKQFYQKITSNNQITTIEPPSRQELTAFWRSLWSEPKTHNENAPWIRQEETKHQHITEQGNVILTTEEIAETIKHTHNWKCPGVDNVQNFWYKQFSSTYEMLTDQINKAILQPNRLPKFLTQGITYIKPKNADTKNPANYRPITCLPTLYKIITATICRRIEQHLMQNNILTEEQKGCRKHSQGCKEQLIIDSVIMEQTRKEHRNLHTCFIDYKKAFDSVPHSWLMKTLQIYKINPGLRQFLKSTMETWRTNIHLQTHDGHIQTDELHIRRGIFQGDSLSSLWFCLCLNPLSNTLNSTNHGFNIRHHKADQHKINHLLYMDDIKLYAATEVQLRELLKITEVYTSDIRMEFGMSKCKVLHINKGQWKNQPEKEVVTGQPLDNMDKDETYKYLGFNQNVKIDHTQVKAQLTQEFKDRLIKLLKTKLNSKNLTKAINTFAIPVLTYSFGIIKWSHTDIENIHILIRTELTKHRMSHPNACKERLAIDRKLGGRGIIDIQSLRTTQIQTLRHFFHTKQTNLHKAIVKADKNYTPLNLSSPDHVADTYNHIQSQQEKINTWSQKALHGKHRYRVTQDHINQKQSCAWLQDGQLFPETEGFMLAIQDQVIATRNYKKYIIKDPSITDDNCRKCQQQKETIDHITSGCKTLAGTKYTARHNSAAKVIHQALATTNKLIENTDPYYNYTPTSVLENDQYKLYWDVEIHTDKTIPANRPDIVFQSKADKITYLIDIAIPNDVNIQNTYAGKISKYTDLAMEIKRLWKQNKVTIVPLIMSVSGLTPSTFTQHLQQLGLDEKLHKVFQKSVILKTCNIVRSFLNSDQ

SEQ ID NO: 32186 - protein, 989 aa, Callosobruchus maculatus
MNTQYNKWCGTNPVLRDPLPRLIFKNNTRQILHTINANIIPQFLTNDSDLEDIHTVIYAAAATTLIVNGQKLPKRSKNHTSKRSKPKWQIRIENKISTLRKDLAHVTQYTNNNNLSKRIQTTINRLKSKSPQQTIPEIADTLKQKLAVYAARLRRYNESNDRKDANNLFQKSEKQFYQKMTSNNQITTTEPPSRQELTEFWGSLWSEPKTHNENAPWIRQEEEKHQHIAEQGDVVFTPDEIAETIKHTHNWKCPGVDNVQNFWYKQFSATYVMLTEQINKAILQTNRLPKFLTQGITYIKPKNGDTRNPANYRPITCLPTLYKIITATIGKRIEQHLTQNNILTEEQKGCRKQSQGCKEQLIIDSVIMEQTRKEHRNLHTCFIDYKKAFDSVPHSWLTKTLQIYKINPVLRQFLTRTMETWRTNIHLKTQDGHIQTEELLIRRGIFQGDSLSSLWFCLCLNPLSNALNNTNYGFNIRHQKVNQHRINHLLYMDDIKLYAATEVQLKELLRITEVCTSDVRMEFGMSKCKVLHINKGQWKNQSEQEILTGETLDNMDKDETYKYLGFNQNIKIDHTQAKAQLTQEFRNRLLKLLKSKLNSKNLTKAINTFAIPVLTYSFGIIKWSHTDIENIHILIRTELTKHRMSHPNACKERLTIDRKQGGRGIIDIQSLHTRQIKTLRDFFQSKQTNLHRSIVKADKNYTPLNLSRSDHSADGHNHIELQQEKINTWSQKALHGKHRYRVTQEHINERQSYTWLQDGQLFPETEGFMLAIQDQVIATRNYMKYIIKDTSITDDNCRKCHQQKETIDHITSGCKTLAGTEYTARHNSAAKVIHQALATTNKLIENTDPYYNYTPTSVLENNEYKLYWDVEIHTDKTIPANRPDIVFQLKADKVTYLIDIAIPNDTNIQNAYAGKISKYTDLAIEIKRLWKQNKVTIVPLIMSVSGLTPNTFTPHLQQLGLDEKLHKIFQKSVILKTCNIVRSFLNSDP

SEQ ID NO: 32187 - protein, 989 aa, Callosobruchus maculatus
MNTQYNKWCGTNPTLRDPLPRLIFKNNTRQILQTVNSNIIPQFLTKDSNLEDIHTVIYAAAATTLIVNGQKLPKRSKDHTSKRSKPKWQIRIENKISTIRKDLAHVTQYIHKNNLSKRIQTTINRLKSRSPQQTISEIYDTLKQKLAVYAARLRRYNESNDRKDTNNLFQKSERQFYQKITSNNQITTIEPPSRKELTDFWGSLWSEPKTHNENAPWIRQEEEKQQHIPEQGDVILTPQEIAETIKHTHNWKCPGVDNVQNFWYKQFSATYEILTDQINKAILQPNRLPKFLTQGVTYIKPKNADTKNPANYRPITCLPTLYKIITATIGKRIEQHLTQNNILTEEQKGCRKQSQGCKEQLIIDSVIMEQTRKEHRNLHTCFIDYKKAFDSVPHSWLTKTLQIYKINPTLRQFLTRTMETWRTNIHLKTQDGHIQTEELCIRRGIFQGDSLSSLWFCLCLNPLSNALNNTNYGFNIRHQKVNQHRISHLLYIDDIKLYAATEVQLKELLKLTEVCTSDVRMEFGMSKCKVLHIHKGQWKNHSEQELLTGQTLDNMEKDETYKYLGFNQNIKIDHSEVKAQLTQEFRDRLITLLKTKLNSKNLTKAINTFAIPVLTYSFGIIKWSHTDIENINILIRTELTKHRMSHPKACKERLTIDRKHGGRGIIDIQSLHTRQIKTLRDFFQSKETNLHRSIVKADKHYTPLTVSRPDHPADAHNHIELQQEKINTWSQKALHGKHRYRVTQDHINERQSYTWLQDGQLFPETEGFMLAIQDQVIATRNYMKYIIKDTSITDDNCRKCHQQKETIDHITSACKTLAGTEYTARHNSAAKVIHQALATTNKLIENTNPYYNYTPTSVLENNEYKLYWDVEIHTDKTIPANRPDIVFQSKADKVTYLIDIAIPNDTNIQNAYAGKISKYTDLAIEIKRLWKQNKVTIVPLIMSVSGLTPNTFTPHLKQLGLDERLHKIFQKSVILKTCNIVRSFLNSDP

SEQ ID NO: 32188 - protein, 902 aa, Callosobruchus maculatus
MSAVHYGAHCTVRNKLLFSDNNNNNNNNNTRRIQTTIDILKSKSPQKSIPEITDTLKQKLAVYAARLRRYNESNDRKDANNLFQKSEKQFYKKITTDNQITAIELPSKQELTEFWGSLWSEPKTHNENAPWIRQEEEKHQHIAEQGNVILTPEEIAETIKHTHNWKCPGVDNIQNFWYKQFSSVYEVLTDQINKAILQPNRLPKFLTQGITYIKPKNADTKNPANYRPITCLPTLYKIITATICRRIEKHLTENSILTEEQKGCRKQSQGCKEQLIIDSVIMEQTRKEHRNLHTCFIDYKKAFDSVPHSWLTKTLQIYKINPGLRQFLTRTMETWRTNIHLQTEDGHIQTDELHIRRGIFQGDSLSSLWFCLCLNPLSNTLNSTNCGFTIRHQKANQHKINHLLYMDDLKLYAATEVQLRELLRITEVCTSDIKMEFGMSKCKVLHINKGQWKNHPEQEVVTGQALDNMDKDETYKYLGINQNAKIDHTRIKSQLTQEFKDRLIRLLKTKLNSRNLTKAINTFAIPILTYSFGIIKWSHTDIENIHILIRTELTKHRMSHPKACKERLTIDRKQGGRGIIDIQSLHAKQIKSLRHFFHSKQTNLHKAIVKADKNYTPLALSCPDHAADAHNHIQAQQEKINTWSQKALHGKHRYRVTQDHINEKQSYTWLQDGQLFPETEGFMLAIQDQVIATRNYRKYIMKDPSISDDNCRKCHQQKETIEHITSGCKTLAGTEYTARHNSAAKVIHQALATTNKLIENTDPYYNYTPTSVLENNQFKLYWDIEIHTDKTIPANRPDIVFQSKTDKVTYLIDIAIPNDMNIQNTYAGKISKYTDLAIEIKRLWKQNKVVIVPFIMSVSGLTPNTFTPHLQQLGLDEKLHKTFQKSVILKTCSIVRSFLNSE

SEQ ID NO: 32189 - protein, 1132 aa, Callosobruchus maculatus
MRCYYTATKLETISTGYRHELHRLFTTQYPHLSTRVTEQRLIDQKRVITKNNRLTPQELQDIKNLVSNEMNIVQPNDSLTTEQIVETQNSDTQTSQTSNIAKTNNTSIHSELGPEHDQALDTPDTTTTNLPSTIIQIQNITRPFAVTQSVEQVMRTQYNKWCGTNPALRDPLPRLIFKNNTQQILHTVNANVIPQFIRDDSNLEDIHTVIYAAAATTLIVNGQKLSKRSKHQTSNRTKPKWQIRIENKISTIRKDLAHLAQYTINNNHPSRHIQRTINILKSKSPQQTIPEITDTLKQKLAVYAARLRRYNESNARKDANSLFQKSEKQFYQKITADNQITTIEPPSKQELTEFWGSLWSEPKTHNEDAPWIREEEEKHQHIAEQGDVVLSKEEIVETIKHTHDWKCPGVDNVQNFWYKHFSSTYQVLTNQINKAIRQPDRLPKFLTQGITYIKPKNADTKNPANYRPITCLPTLYKIITATLCRRIEQHLTQNNILTEEQKGCRKQSQGCKEQLIIDSVIMEQTRKEHRNLHTCFIDYKKAFDSVPHSWLTKILQIYKINPGLRQFLAKTMKTWRTNIHLTTQDGHIQTEELHIRRGIFQGDSLSSLWFCLCLNPLSNALNNTNYGFNIRHQKVNQHRINHLLYMDDIKLYAATDVQLRELLRITEVYTSDVRMEFGMNKCKVLHINKGQWKNHPEQEIVTGQTLDNMDKEETYKYLGFNQSVKIDHTQIKAERRQVFRDRLIKLLKTKLNSRNLTKAINTFAIPILTYSFGIIKWSHTDIENIHILIRTELTKHRMSHPNACKERLTIDRTQGGRGITDIQSLRTRQIKTLRHFFQNKQTNLHRAIVKADKNYTPLNLSCPDHVADTHNPTQSQQEKISTWSQKPLHGKHRYRVTQDHINKKQSYTWLQDGQLFPETEGFMLAIQDQVIATRNYKKYIIKDPSITDDNCRKCQQQKETIDHITSGCKTLAGTEYTARHNSAAKVIHQALATTNKLIENTDPYYNYTPTSVLENDQYKLYWDVQIHTDKTIPANRPDIVFQSKLDKVTYLIDIAIPNDVNIQNTYAGKISKYTDLAMEIKTPLEAGQSYYCSPHYVSLRPYTKHIYTTPTTVRPGRKVTQNIPKVCNSEDL

SEQ ID NO: 32190 - protein, 1245 aa, Callosobruchus maculatus
MHRVTSKNNQRRRRVRRLNSPEPQTQTEQPIERNPAADVLPAQPTTTKAGKPRQRLQWTTEMNKSVMHCYYTATRLETISTGYRHELHRLFIAQYPHLAERVTEQRLIDQKRVITKNNRLTPEELQAIKILVSNEVNTVRQNDPQTSNTTTSDNTTIPTEIDPEHEHTQDRPDTAVQPNDSLAIESITEGHTIHTRNNQPPNKDTTNDTSIHLEIDPEHDHAPHTPETTCSNLPSTATQSQNITLPPAITQSAKQVMNTQYNKWCGTNPVLRDPLPRLIFKNNTRQILHTINANIIPQFLTNDSDLEDIHTVIYAAAATTLIVNGQKLPKRSKNHTSKRSKPKWQIRIENKISTLRKHLAHVTQYTNNNNLSKRIQTTINRLKSKSPQQTIPEIADTLKQKLAVYAARLRRYNESNDRKDANNLFQKSEKQFYQKMTSNNQITTTEPPSRQELTEFWGSLWSEPKTHNENAPWIRQEEEKHQHIAEQADVVFTPDEIAETIKHTHNWKCPGVDNVQNFWYKHFSTTYEMLTEQINKAILQPNRLPKFLTQGITYIKPKNGDTRNPANYRPITCLPTLYKIITATIGKRIEQHLTQNNILTEEQKGCRKQSQGCKEQLIIDSVIMEQTRKEHRNLHTCFIDYKKAFDSVPHSWLTKTLQIYKINPVLRQFLTRTMETWRTNIHLKTQDGHIQTEELLIRRGIFQGDSLSSLWFCLCLNPLSNALNNTNYGFNIRHQKVNQHRINHLLYMDDIKLYAATEVQLKELLRITEVCTSDVRMEFGMSKCKVLHINKGQWKNQSEQEILTGETLDNMDKDETYKYLGFNQNIKIDHTQVKAQLTQEFRNRLLKLLKSKLNSKNLTKAINTFAIPVLTYSFGIIKWSHTDIENIHILIRTELTKHRMSHPNACKERLTIDRKQGGRGIIDIQSLRTRQIKTLRDFFQSKQTNLHRSIVKADKNYTPLNLSRSDHSADGHNHIELQQEKINTWSQKALHGKHRYRVTQEHINERQSYTWLQDGQLFPETEGFMLAIQDQVIATRNYMKYIIKDTSITDDNCRKCHQQKETIDHITSGCKTLAGTEYTARHNSAAKVIHQALATTNKLTENTDPYYNYTPTSVLENNEYKLYWDVEIHTDKTIPANRPDIVFQSKADKVTYLIDIAIPNDTNIQNTYAGKISKYTDLAIEIKRLWKQNKVTIVPLIMSVSGLTPNTFTPHLQQLGLDERLHKIFQKSVILKTCNIVRSFLNSDP

SEQ ID NO: 32191 - protein, 1116 aa, Callosobruchus maculatus
MDRVNFMNNQRRPRVRRLNSPEPQTQTEQPIEHNPAADVLPTQPATTKAGKPRQRLQWTTEMNKSVMRCYYTATKLETISTGYRHELHRLFTTQYPHLSTRVTEQRLIDQKRVITKNNRLTPQELQDIKNLVSNEMNTVQPNDSLTTEQIVETQNSDTQTSQTSNTAKTNNTSIHSELGPEHDQALDTPDTTITNLPSTIIQIQNITRPFAVTQSVEQVMSTQYNKWCGTNPALRDPLPRLIFKNNTQQILHTVNANVIPQFIRDDSNLEDIHTVIYAAAATTLIVNGQKLSKRSKHQTSNRTKPKWQIRIENKISTIRKDLAHLAQYTINNNHPSRHIQRTINILKSKSPQQTIPEITDTLKQKLAVYAARHRRYNESNARKDANSLFQKSEKQFYQKITADNQITTIEPPSKQELTEFWGSLWSEPKTHNEDAPWIREEEQKHQHIAEQGDVILSKEEIVETIKHTHDWKCPGVDNVQNFWYKHFSSTYEVLTNQINKAIRQPDRLPKFLTQGITYIKPKNADTKNPANYRPITCLPTLYKVITATLCRRIEQHLTQNNILTEEQKGCRKQSQGCKEQLIIDSVIMEQTRKEHRNLHTCFIDYKKAFDSVPHSWLTKILQIYKINPGLRQFLAKTMKTWRTNIHLTTQDGHIQTEELHIRRGIFQGDSLSSLWFCLCLNPLSNALNNTNYGFNIRHQKVNKHRINHLLYMDDIKLYAATDVQLRELLRITEVYTSDVRMEFGMNKCKVLHINKGQWKNHPEQEIVTGQTLDNMDKEETYKYLGFNQSVKIDHTQIKAELRQVFRDRLIKLLKTKLNSRNLTKAINTFAIPILTYSFGIIKWSHTDIENIHILIRTELTKHRMSHPNACKERLTIDRTQGGRGITDIQSLRTRQIKTLRHFFQNKQTNLHRAIVKADKNYTPLNLSCPDHVADTHNPTQSQQEKISTWSQKPLHGKHRYRVTQDHINKKQSYTWLQDGQLFPETEGFMLAIQDQVIATRNYKKYIIKDPSITEDNCRKCQQQKETIDHITSGCKTLAGTEYTARHNSAAKVIHQALATTNKLIENTDPYYNYTPTSVLENDQYKLYWDVQIHTDKTIPANRPDIVSSQSSTKLHT

SEQ ID NO: 32192 - protein, 1074 aa, Callosobruchus maculatus
MNIVQPNDSLTTEQIVETQNSDTQTSQTLNTAKTNNTSIHSQLGLEYDQALDTPDTTITNLPSTIIQIQNITRPFAVTQSVEQVMSTQYNKWCGTNPALRDPLPRLIFKNNTQQILHTVNANVIPQFIRDDSNLEDIHTVIYAAAATTLIVNGQKLSKRSKHQTSNRTKPKWQIRIENKISTIRKDLAHLAQYTINNNHPSRHIQRTINILKSKSPQQTIPEITDTLKQKLAVYAARLRRYNESNARKDANSLFQKSEKQFYQKITADNQITTIEPPSKQELTEFWGSLWSEPKTHNEDAPWIREEEEKHQHIAEQGDVILSKEEIVETIKHTHDWKCPGVDNVQNFWYKHFSSTYEVLTNQINKAIRQPDRLPKFLTQGITYIKPKNADTKNPANYRPITCLPTLYKIITATLCRRIEQHLTQNNILTEEQKGCRKQSQGCKEQLIVDSVIMEQTRKEHRNLHTCFIDYKKAFDSVPHSWLTKILQIYKINPGLRQFLAKTMKTWRTNIHLTTQDGHIQTEELHIRRGIFQGDSLSSLWFCLCLNPLSNALNNTNHGFNIRHQKVNQHRINHLLYMDDIKLYAATDVQLRELLRITEVYTSDVRMEFGMNKCKVLHINKGQWKNHLEQEIVTGQTLDNMDKEETYKYLGFNQSVKIDHTQIKAELRQVFRDRLIKLLKTKLNSRNLMKAINTFAIPILTYSFGIIKWSHTDIENIHILIRTELTKHRMSHPNACKERLTIGRTQGGRGITDIQSLRTRQIKTLRHFFQNKETNLHRAIVKADKNYTPLNLSCPDHVADTHNPTQSQQEKISTWSQKPLHGKHRYRVTQDHINKKQSYTWLQDGQLFPETEGFMLAIQDQVIATRNYKKYIIKDPSITDDNCRKCQQQKETIDHITSGCKTLAGTEYTARHNSAAKVIHQALATTNKLIENTDPYYNYTPTSVLENDQYKLYWDVQIHTDKTIPANRPDIVFQSKLDKVTYLIDIAIPNDVNIQNTYAGKISKYTDLAMEIKRLWKQDKVTIVPLIMSVSGLTPNTFTPHLQQLGLDEKLHKTFQKSVILKTCNIVRSFLNSDQ

SEQ ID NO: 32193 - protein, 1147 aa, Callosobruchus maculatus
MNKSVMHCYYTATKLETISTGYRHELHRLFTAQYPHLSTRVTEQRLIDQKRVITKNNRLTPQELQAIKSLVSNEINTVPPNDSLADESTTERQNIHSRNSQTPNTDTNNDTSIHSDMDSGHEHIPDTPDQTSINLPLTATQSQKVTPPPSITQSTEQVMDTQYNKWCSTNPALRDPLPRLIFKNNTQQILHTINSNIIPQFLTNVSNLEDIHTVIYAAAATTLTVNGQKLPKRSKDHTSNRPKPKWQIRIENRISAIRKDLAHLAQYTNNNNRSKRIQTTIDILKSKSPQKSIPEIADTLKQKLAVYAARLRRYNESNERKNANNLFQKSEKQFYQKITANNQEATIEPPSRQDLTEFWSSLWSEPKTHNQDAPWIRQEEENHQHIMEQGDVILTPEEIAETIKHTHNWKCPGVDNIQNFWYKQLSSTYEVLTDQINKAILQPNRLPKFLTQGITYIKPKNTDTKNPANYRPITCLPTLYKIITATICRRIEQHLTQNNILTEEQKGCRKQSQGCKEQLIIDSAIMEQTRKEHRNLHTCFIDYKKAFDSVPHSWLKKTLQIYKINSGLRQFLTRIMETWRTNIHLKTQHGHIQTDELHIRRGIFQGDSLSSLWFCLCLNPLSNALNNTNCGFNIRHEKVNQHKINHLLYMDDIKLYAATEVQLRELLRVTEVCTSDVRMEFGMSKCKVLHINKGQWKSHQERETLTGQTLDNMDKGETYKYLGFNQSVKIDHSQVKEQLIQEFRDRLIKLLKTKLNSRNLTKAINTFAIPVITYSFGIIKWSHTDIENIQILIRTELTRHRMSHPNACKERLTIDRKQGGRGIIDIQSLRTKQIKTLRHFFQSKQTNLHRAIVKADKNYTPLTLSSPNHAADTHNPIESQQEKINTWSQKALHGKHRYRITQDHINEKQSYTWLQEGQLFPETEGFMLAIQDQVIATRNYKKYIIKDPSVTNDNCRKCHQQKETIDHITSACKTLAGTEYTARHNSAAKIIDQALATTNKLIENTAPYYNYTPTSVLDNNQYKLYWDVEIHTDKTIPANRPDIVFQSKADKVTYLIDIAIPNDTNVQTAYAGKISKYTDLAIEVKRLWKQNKVVIVPLIMSVSGLTPNTFTPHLHQLGLDEKLHKIFQKSVILKTCNIVRSFLNSDQ

SEQ ID NO: 32194 - protein, 989 aa, Callosobruchus maculatus
MDTQYNKWCGTNPVLRDPLPRLIFKNNTQQILHTINSNIIPQFLTNVSNLEDIHTVIYAAAATTLTVNGQKLPKRSKDHTSNRPKPKWQIRIENKISAIRKDLAHLAQYTNNNNRSKRIQTTIDILKSKSPQKSIPEIADTLKQKLAVYAARLRRYNESNERKNANNLFQKSEKQFYQKITANNQEATTEPPSRQDLTKFWSSLWSEPKTHNQDAPWIRQEEEKHQHIMEQGDVILTPEEIAETIKHTHNWKCPGVDNIQNFWYKQFSSTYEVLTDQINKAIRQPNRLPKFLTQGITYIKPKNTDTKNPANYRPITCLPTLYKIITATICRRIEQHLTQNNILTEEQKGCRKQSQGCKEQLIIDSVIMEQTRKEHRNLHTYFIDYKKAFDSVPHSWLKKTLQIYKINSGLRQFLTRIMETWRTNIHLKTQHGHIQTDELHIRRGIFQGDSLSALWFCLCLNPLSNALNNTNCGFNIRHEKVNQHKINHLLYMDDIKLYAATEVQLRELLRITEVCTSDVRMEFGMSKCKVLHINKGQWKSHQERETLTGQTLDNMDKGETYKYLGFNQSVKIDHSQVKEQLIQEFKDRLIKLLKTKLNSRNLTKAINTFAIPVITYSFGITKWSHTDIENIQILIRTEFTRHRMSRPNACKERLTIDRKQGGRGIIDIQSLRTKQIKTLRHFFQSKQTNLHRAIVKADKNYTPLTLSSPNHAADTHNPIELQQEKINTWSQKALHGKHRYRITQDHINEKQSYTWLQDGQLFPETEGFMLAIQDQVIATRNYKKYIIRDPSVTNDNCRKCHQQKETIDHITSACKTLAGTEYTARHNSAAKIIHQALATTNKLIENTDPYYNYTPTSVLDNNQYKLYWDVEIHTDKTIPANRPDIVFQSKADKVTYLIDIAIPNDTNVQAAYAGKISKYTDLAIEVKRLWKQNKVVIVPLIMSVSGLTPNTFTPHLHELGLDEKLHKIFQKSVILKTCNIVRSFLNSDQ

SEQ ID NO: 32195 - protein, 989 aa, Callosobruchus maculatus
MNTQYNKWCGTNPTLRDPLPRLIFKNNTLQILHTINVNIIPQFLTKDSDLEDIHTVIYAAAATTLTLNGQKIPKRSIARTTERSKPKWQIRIENKISTIRKDLAHLAQYTNNNNRSKRIQTTINILKSKSPQQTISEIADTLKQKLAVYAARLRRYNESNARKDANNLFQKSEKQFYQKITDDNQITAIEPPSKQELTEFWGSLWSEPKTHNENAPWIRQEEEKHQHIVEQGDVILTPEEIAETIKHTHNWKCPGVDNVQNFWYKQFSATYEMLTDQVNKAILQPNRLPKFLTQGITHIKPKNADTKNPANYRPITCLPTLYKIITATICRRIEQHLTQNNILTEEQKGCRKHSQGCKEQLIIDSVIMEQTRKEHRNLHTCFIDYKKAFDSVPHSWLAKTLQIYKINPGLRQFLTRTMETWRTNIHLKTQDGHIKTDELHIRRGIFQGDSLSSLWFCLCLNPLSNALKNTNCGFNIRHERLNQHKINHLLYMDDIKLYAANEVQLRELIRITEVCSSDVRMEFGMSKCKVLHINKGQWKDHPEQETVTGQTLNNMNKDETYKYLGFNQNVKIDHTKVKAQLTQEFRDRLIKLLKTKLNSRNLTKAINTFAIPVLTYSFGIIKWSHTDIENIHILIRTELTKHRMSHPNACKERLTIDRKQGGRGIVDIQSLRTRQIKTLRHFFQNKQTNLHRAIVKADRNYTPLNLSCPDHAADTHNPTQSQQEKINTWSQKPLHGKHRYRITQDHINEKQSYTWLQDGQLFPETEGFMLAIQDQVIATRNYKKYIIKDPSITEDSCRKCHQQKETIDHITSGCKVLAGTEYTARHNSAAKVIHQALATANKLIENTDPYYNYTPTSVLENDRYKLYWDVEIHTDKTIPANRPDIVFQSKADKITYLIDIAIPNDVNVQNTYAGKISKYTDLAMEIKRLWKQNKVTIVPLIMSVSGLTPNTFTQHLQQLGLDEKLHKVFQKSVILKTCNIVRSFLNSDQ

SEQ ID NO: 32196 - protein, 1209 aa, Callosobruchus maculatus
MDRVNFMNNQRRPRVRRLNSPEPQTQTEQPIEHNPAADVLPTQPATTKAGKPRQRLQWTTEMNKSVMRCYYTATKLETIFTGYRHELHRLFTTQYTHLSTRVTEQRLIDQKRVITKNNRLTPQELQDIKNLVSNEMNIVQPNDSLTTEQIVETQNSDTQTSQTSNIAKTNNTSIHSELGPEHDQALDTPDTTTTNLPSTIIQIQNITRPFAVTQSVEQVMRTQYNKWCGTNPALRDPLPRLIFKNNTQQILHTVNANVIPQFIRDDSNLEDIHTIIYAAAATTLIVNGQKLSKRSKHQTSNRTKPKWQIRIENKISTIRKDLAHLAQYTINNNHPSRHIQRTINILKSKSPQQTIPEITDTLKQKLAVYAARLRRYNESNARKDANSLFQKSEKQFYQKITADNQITTIEPPSKQELTEFWGSLWSEPKTHNEDAPWIREEEEKHQHIAEQGDVVLSKEEIVETIKHTHDWKCPGVDNVQNFWYKHFSSTYQVLTNQINKVIRQPDRLPKFLTQGITYIKPKNADTKSPANYRPITCLPTLYKIITATLCRRIEQHLTQNNILTEEQKGCRKQSQGCKEQPIIDSVIMEQTRKEHRNLHTCFIDYKKAFDSVPHSWLTKILQIYKINPGLRQFLAKTMKTWRTNIHLTTQDGHIQTEELHIRRGIFQGDSLSSLWFCLCLNPLSNALNNTNYGFNIRHQKVNQHRINHLLYMDDIKLYAATDVQLRELLRITEVYTSDVRMEFGMNKCKVLHINKGQWKNHPEQEIVTGQTLDNMDKEETYKYLGFNQSVKIDHTQTKAELRQVFRDRLTKLLKTKLNSRNLTKAINTFAIPILTYSFGIIKWSHTDIENIHILIRTELTKHRMSHPNACKERLTIDRTQGGRGITDIQSLRTRQIKTLRHFFQNKQTNLHRAIVKAYKNYTPLNLSCPDHVADTHNPTQSQQEKISTWSQKPLHGKHRYRVTQDHINKKQSYTWLQDGQLFPETEGFMLAIQDQVIATRNYKKYIIKDPSIADDNCRKCQQQKETIDHITSGCKTLAGTEYTARHNSAAKVIHQALATTNKLIENTDPYYNYTPTSVLENDQYKLYWDVQIHTDKTIPANRPDIVFQSKLDKVTYLIDIAIPNDVNIQNTYAGKISKYTDLAMEIKRLWKQDKVTIVPLIMSVSGLTPNTFTPHLQQLGLDEKLHKTFQKSVILKTCNIVRSFLNSDQ

SEQ ID NO: 32197 - protein, 1247 aa, Callosobruchus maculatus
MHRVTSKNNQRRPRVRRLNSPEPQTQTEQPIERNPAADVLPAQPATTKAGKPRQRLQWTTEMNKSVMHCYYTATRLETISTGYRHELHRLFIAQYPHLAERVTEQRLIDQKRVITKNNRLTPEELQAIKILVSNEVNTVRQNDPQTSNTTTSDNTTIPTEIDPEHEHTQDRPDTAVQPNDSLAIESITEGHTIHTRNNQPPNKDTTKDTSIHLEIDPEHDHAPHTPETTCSNLPSTATQSQNITLPPAITQSAKQVMNTQYNKWCGTNPVLRDPLPRLIFKNNTRQILHTISANIIPQFLTNDSDLEDIHTVIYAAAATSLIVNGQKLPKRSKNHTSKRSKPKWQIRIENKISTLRKDLAHVTQYTNNNNLSKRIQTTINRLKSKSPQQTIPEIADTLKQKLAVYAARLRRYNESNDRKDANNLFQKSEKQFYQKMTSNNQITTTEPPSRQELTEFWGSLWSEPKTHNENAPWIRREEEKHQHIAEQGDVVFTPDEIAETIKHTHNWKCPGVDNVQNFWYKQFSATYEMLTEQINKAILQPNRLPKFLTQGITYIKPKNGDTRNPANYRPITCLPTLYKIITATIGKRIEQHLTQNNILTEEQKGCRKQSQGCKEQLILIIDSVIMEQTRKEHRNLHTCFIDYKKAFDSVPHSWLTKTLQIYKINPVLRQFLTRTMETWRTNIHLKTQDGHIQTEELLVRRGIFQGDSLSSLWFCLCLNPLSNALNNTNYGFNIRHQKVNQHRINHLLYMDDIKLYAATEVQLKELLRITEVCTSDVRMEFGMSKCKVLHVNKGQWKNQSEQEILTGETLDNMDKDETYKYLGFNQNIKIDHTQAKAQLTQEFRNRLLKLLKSKLNSKNLTKAINTFAIPVLTYSFGIIKWSHTDIENIHILIRTELTKHRMSHPNACKERLTIDRKQGGRGIIDIQSLHTRQIKTLRDFFQSKQTNLHRSIVKADKNYTPLNLSRSDHSADGHNHIELQQEKINTWSQKALHGKHRYRVTQEHINERQSYTWLQDGQLFPETEGFMLAIQDQVIATRHYMKYIIKDTSITDDNCRKCHQQKETIDHITSGCKTLAGTEYTARHNSAAKVIHQALATTNKLIENTDPYYNYTPTSVLENNEYKLYWDVEIHTDKTIPANRPDIVFQSKADKVTYLIDIAIPNDTNIQNAYAGKISKYTDLAIEIKRLWKQNKVTIVPLIMSVSGLTPNTFTPHLQQLGLDEKLHKIFQKSVILKTCNIVRSFLNSDP

SEQ ID NO: 32198 - protein, 899 aa, Callosobruchus maculatus
MRIENKITTIRKELAHLAQYTNNNNRSKRIQTTIDILKSKSPQKSIPEITDTLKQKLAVYAARLRRYNESNERKDANNLFQKSEKQFYKKITTDNQITAIELPSKQELTEFWGSLWSEPKTHNENAPWIRQEEEKHQHIAEQGNVILTPEEIAETIKHTHNWKCPGVDNIQNFWYKQFSSVYEALTDQINKAILQPNRLPKFLTQGITYIKPKNADTKNPANYRPITCLPTLYKIITATICRRIEKHLTENSILTEEQKGCRKQSQRCKEQLIIDSVIMEQTRKEHRNLHTCFIDYKKAFDSVPHSWLTKTLQIYKINPGLRQFLTRTMETWRTNIHLQTEDGHIQTDELHIRRGIFQGDSLSSLWFCLCLSPLSNTLNSTNCGFTIRHQKANQHKINHLLYMDDLKLYAATEVQLRELLRIAEVCTSDIKMEFGMSKCKVLHINKGQWTNHPEQEVVTGQALDNMDKDETYKYLGINQNAKIDHTKIKSQLTQEFKDRLIRLLKTKLNSRNLTKAINTFAIPILTYSFGIIKWSHTDIENIHILIRTELTKHRMSHPKACKERLTIDRKQGGRGIIDIQSLHAKQIKSLRHFFHSKQTNLHKAIVKADKNYTPLALSCPDHAADAHNHIQAQQEKINTWSQKALHGKHRYRVTQDHINEKQSYTWLQDGQLFPETEGFMLAIQDQVIATRNYRKYIMKDPSISDDNCRKCHQQKETIEHITSGCKTLAGTEYTARHNSAAKVIHQALATTNKLIENTDPYYNYTPTSVLENNQFKLYWDIEIHTDKTIPANRPDIVFQSKTDKVTYLIDIAIPNDMNIQNTYAGKISKYTDLAIEIKRLWKQNKVVIVPFIMSVSGLTPNTFTPHLQQLGLDEKLHKTFQKSVILKTCSIVRSFLNSE

SEQ ID NO: 32199 - protein, 1208 aa, Callosobruchus maculatus
MDKVSFSNNQRRPRVRRLNSPEPQNQTPQPIAHNPTADVLPVQPATTKAGKPRQRLQWTTEMNKSVMHCYYTATKLETISTGYRHELHRLFTAQYPHLSTRVTEQRLIDQKRVITKNNRLTPQELQAIKSLVSNEINTGPPNDSLADESTTERQNIHSRNSQTPNTDTTNDTSIHSDMDSEHEHIPDTPDQTSINPPLTATQSQKVTPLPSITQSTEQVMNTQYNKWCGTNPALRDPLPRLIFKKNTQQILHTINSNIIPQFLTNVSNLEDIHTVIYAAAATTLTVNGQKLPKRSKGHTSNRPKPKWQIRIENKISAIRKDLAHLAQYTNNNSRSKRIQTTIDILKSKSPQKSIPEIADTLKQKLAVYAARLRRYNESNERKNANNLFPKSEKQFYQKITANNQEATIEPPSRQDLTEFWSSLWSEPKTHNQDAPWIRQEEEKHQHIMEQGDVILTPEEIAETIKHTHNWKCPGVDNIQNFWYKQFSSTYEVLTDQINKAILQPKRLPKFLTQGITYIKPQNTDTKNPANYRPITCLPTLYKIITATICRRIEQHLTQNNILTEEQKGCRKQSQGCKEQLIIDSVIMEQTRKEHRNLHTCFIDYKKAFDSVPHSWLKKTLQIYKINSGLRQFLTRIMETWRTNIHLKTQHGHIQTDELHIRRGIFQGDSLSSLWFCLCLNPLSNALNNTNCGFNIRHEKVNQHKINHLLYMDDIKLYAATEVQLRELLRITEVCTSDVRMEFGMSKCKVLHINKGQWKSNQERETLTGQTLDNMDKGETYKYLGFNQSVKIDHSQVKEQLIQEFRDRLIKLLKTKLNSRNLTKAINTFAIPVITCSFGIIKWSHTDIENIQILIRTELTRHRMSHPNACKERLTIDRKQGGRGIIDIQSLRSKQIKTLRHFFQSKQTNLHRAVVKADKNYTPLTLSSPNHAADTHNPIELQQEKINTWSQKALHGKHRYRITQDHINEKQSYAWLQDGQLFPETEGFMLAIQDQVIATRNYKKYIIKDPSVTNDNCRKCHQQKETIDHITSACKTLAGTEYTARHNSAAKIIHQALATTNKLIENTAPYYNYTPTSVLDNNQYKLYWDAEIHTDKTIPANRPDIVFQSKADKVTYLIDIAIPNDTNVQTAYAGKISKYTDLAIEVKRLWKQNKVVIVPLIMSVSGLTPNTFTPHLHQLGLDEKLHKIFQKSVILKTCNIVRSFLNSDQ

SEQ ID NO: 32200 - protein, 989 aa, Callosobruchus maculatus
MNTQYNKWCGTNPVLRDPLPRLIFKNNTQQILHTINANIIPQFLTNDSDLEDIHTVIYAAAATALIVNGQKLPKRSKNHTSKRSKPKWQIRIENKISTLRKDLAHVTQYTNNNNLSKRIQTTINRLKSKSPQQTVPEIADTLKQKLAVYAARLRRYNESNDRKDANNLFQKSGKQFYQKMTSNNQIITTEPPSRQELTEFWGSLWSEPKTHNENAPWIRQEEEKHQHIAEQGDVVFTPDEIAETIKHTHNWKCPGVDNVQNFWYKQFSATYEMLTEQINKAILQPNRLPKFLTQGITYIKPKNGDTRNPANYRPITCLPTLYKIITATIGKRIEQHLTQNNILTEEQKGCRKQSQGCKEQLIIDSVIMEQTRREHRNLHTCFIDYKKAFDSVPHSWLTKTLQIYKINPALRQFLTRTMETWRTNIHLKTQDGHIQTEELLIRRGIFQGDSLSSLWFCLCLNPLSNALNNTNYGFNIRHQKVNQHRINHLLYMDDIKLYAATEVQLKELLRITEVCTSDVRMEFGMSKCKVLHINNGQWKNQSEQEILTGETLDNMDKDETYKYLGFNQNIKIDHTQVKAQLTQEFRNRLLKLLKSKLNSKNLTKAINTFAIPVLTYSFGIIKWSHTDIENIHILIRTELTKHRMSHPNACKERLTIDRKQGGRGIIDIQSLHTRQIKTLRDFFQSKQTNLHRSIVKADKNYTPLNLSRSDHSADGHNHIELQQEKINTWSQKALHGKHRYRVTQEHINERQSYTWLQDGQLFPETEGFMLAIQDQVIATRNYIKYIIKDTSIIDDNCRKCHQQKETIDHITSGCKTLAGTEYTARHNSAAKVIHQALATTNKLIENTDPYYNYTPTSVLENNEYKLYWDVEIHTDKTIPANRPDIVFQSKADKVTYLIDIAIPNDTNIQNAYAGKISKYTDLAIEIKRLWKQNKVTIVPLIMSVSGLTPNTFTPHLQQLGLDEKLHKIFQKSVILKTCNIVRSFLNSDP

SEQ ID NO: 32201 - protein, 1208 aa, Callosobruchus maculatus
MDKVSFSNNQRRPRVRRLNSPEPQSQTQQPIAHNPTADVLPVQPATTKAGKPRQRLQWTTEMNKSVMHCYYTATRLETISTGYRHELYRLFTAQYPHLSTRVTEQRLIDQKRVITKNNRLTPQELQAIKSLVSNEINTVTPNDSLADESITERQNNHTGSNQTPNTDTTNNTSIHLDVESEHEHIPDTPDQTSINLPSTASQSQNVTPPPCITQSTEQVMNTQYNKWCGTNPTLRDPLPRLIFKNNTRQILQTVNSNIIPQFLTKDSNLEDIHTVIYAAAATTLIVNGQKLPKRSKDHTSKKSKPKWQIRIENKISTIRKDLAHVTQYIHKNNLSKRIQTTISRLKSRSPQQTISEIYDTLKQKLAVYAARLRRYNESNDRKDTNNLFQKSERQFYQKITSNNQITTIEPPSRKELTDFWGSLWSEPKTHNENAPWIRQEEEKQQHIPEQGDVILTPQEIAETIKHTHNWKCPGVDNVQNFWYKQFSATYEMLTDQINKAILQPNRLPKFLTQGVTYIKPKNADTKNPANYRPITCLPTLYKIITATIGKRIEQHLTQNNILTEEQKGCRKQSQGCKEQLIIDSVIMEQTRKEHRNLHTCFIDYKKAFDSVPHSWLTKTLQIYKINPTLRQFLTRIMETWRTNIHLKTQDGHIQTEELYIRRGIFQGDSLSSLWFCLCLNPLSNALSNTNYGFNIRHQKVNQHRISHLLYMDDIKLYAATEVQLKELLKITEVCTSDVRMEFGMSKCQVLHIHKGQWKNHSEQEILTGETLDNMEKDETYKYLGFNQNIKIDHSEVKAQLTQEFRDRLITLLKTKLNSKNLTKAINTFAIPVLTYSFGIIKWSHTDIENINILIRTELTKHRMSHPKACKERLTIDRKHGGRGIIDIQSLHTRQIKTLRDFFQSKETNLHRSIVIADKNYTPLTLSRPDHPADAHNHIELQREKINTWSQKALHGKHRYRVTQDHINERQSYTWLQDGQLFPETEGFMLAIQDQVIATRNYMKYIIKDTSITDDNCRKCHQQKETIDHITSACKALAGTEYIARHNSAAKVIHQALATTNKLIENTDPYYNYTPTSVLENNEYKLYWDVEIHTDKTIPANRPDIVFQSKADKVTYLIDIAIPNDTNIQNAYAGKISKYTDLAIEIKRLWKQNKVNIVPLIMSVSGLTPNTFTPHLQQLGLDERLHKIFQKSVILKTCNIVRSFLNSDP

SEQ ID NO: 32202 - protein, 1209 aa, Callosobruchus maculatus
MDRVNFMNNQRRPRVRRLNSPEPQTQTEQPIEHNPAADVLPTQPATTKAGKPRQRLQWTTEMNKSVMRCYYTATKLETISTGYRHELHRLFTTQYPHLSTRVTEQRLIDQKRVITKNNRLTPQELQDIKNLVSNEMNIVQPNDSLTTEQIVETQNSDTQTSQTSNTAKTNNTSIHSQLGPEYDQALDTPDTTITNLPSTIIQIQNITRPFAVTQSVEQVMSTQYNKWCGTNPALRDPLPRLIFKNNTQQILHTVNANVIPQFIRDDSNLEDIHTVIYAAAATTLIVNGQKLSKRSKHQTSNRTNPKWQIRIENKISTIRKDLAHLAQYTINNNHPSRHIQRTINILKSKSPQQTIPEITDTLKQKLAVYAARLRRYNESNARKDANSLFQKSEKQFYQKITADNQITTIEPPSKQELTEFWGSLWSEPKTHNEDAPWIREEEEKHQHIAEQGDVILSKEEIVETIKHTHDWKCPGVDNVQNFWYKHFSSTYEVLTNQINKAIRQPDRLPKFLTQGITYIKPKNADTKNPANYRPITCLPTLYKIITATLCRRIEQHLTQNNILTEEQKGCRKQSQGCKEQLIIDSVIMEQTRKEHRNLHTCFIDYKKAFDSVPHSWLTKILQIYKIDPGLRQFLAKTMKTWRTNIHLTTQDGHIQTEELHVRRGIFQSDSLSSLWFCLCLNPLSNALNNTNHGFNIRHQKVNQHRINHLLHMDDIKLYAATDVQLRELLRITEVYTSDVRMEFGMNKCKVLHINKGQWKNHPEQEIVTGQTLDNMEKEETYKYLGFNQSVKIDHTQIKAELRQVFRDRLIKLLKTKLNSRNLTKAINTFAIPILTYSFGIIKWSHTDIENIHILIRTELTKHRMSHPNACKERLTIDSTQGGRGITDIESLRTRQIKTLRHFFQNKQTNLHRAIVKADKNYTPLNLSCPDHVADTHNPTQSQQEKISTWSQKPLHGKHRYRVTQDHINKKQSYTWLQDSQLFPETEGFMLAIQDQVIATRNYKKYIIKDPSITDDNCRKCQQQKETIDHITSGCKTLAGTEYTARHNSAAKVIHQALATTNKLIENTDPYHNYTPTSVLENDQYKLYWDVQIHTDKTIPANRPDIVFQSKLDKVTYLIDIAVPNDVNIQNTYAGKISKYTDLAMEIKRLWKQDKVTIVPLVMSVSGLTPNTFTPHLQQLGLDEKLHKTFQKSVILKTCNIVRSFLNSDQ

SEQ ID NO: 32203 - protein, 1207 aa, Callosobruchus maculatus
MDRVNFINNQRRPRVRRLNSPEPQTEKEQPIGDNPVADVLPVEPATTKAGKPRQRLQWTTEMNTSVMHCYYTATKLETISTGYRHELHRLFTAQYPHLSARVTEQRLIDQKRVITKNNRLTPQQLQAIKNLVADEINTVETNDSLVNESITETQHDHTQNAKTPNTNTTNTTSTHLEENPEHEFIPDAPDTVCSNRPPTTTRNQNVTQTPSFTQSAEQVMNAQFNKWCGTNPTLRDPLPRLIFNSNTQKILHTINTNVIPQFLTRDSNLEDIHTVIYAAAAATLIVNGQKLPKRSNNHTSKRSKPKWQMRIENKITTIRKELAHLAQYTNNNNRSKRIQTTIDILKSKSPQKSIPEITDTLKQKLAVYAARLRRYNESNDRKDANNLFQKSEKQFYKKITTDNQITAIELPSKQELTEFWGSLWSEPKTHNENAPWIRQEEEKHQHIAEQGNVILTPEEIAETIKHTHNWKCPGVDNIQNFWYKQFSSVYEVLTDQINKAILQPNRLPKFLTQGITYIKPKNADTKNPANYRPITCLPTLYKIITATICRRIEKHLTENSILTEEQKGCRKQSQGCKEQLIIDSVIMEQTRKEHRNLHTCFIDYKKAFDSVPHSWLTKTLQIYKINPGLRQFLTRTMETWRTNIHLQTEKGHIQTDELHIRRGIFQGDSLSSLWFCLCLNPLSNTLNSTNCGFTIRHQKANQHKINHLLYMDDLKLYAATEMQLKELLRITEVCTSDIKMEFGMSKCKVLHINKGQWKNHPEQEVVTGQALDNMDKDETYKYLGINQNAKIDHTKIKSQLTQEFKDRLIRLLKTKLNSKNLTKAINTFAIPILTYSFGIIKWSHTDIENIHILIRTELTKHRMSHPKACKERLTIDRKQGGRGIIDIQSLHAKQIKSLRHFFHSKQTNLHKAIVKADKNYTPLALSCPDHAADAHNHIQAQQEKINTWSQKALHGKHRYRVTQDHINEKQSYTWLQDGQLFPETEGFMLAIQDQVIATRNYRKHIMKDPSISDDNCRKCHQQKETIEHITSGCKTLAGTEYTARHNSAAKVIHQALATTNKLIENTDPYYNYTPTSVLENNQFKLYWDIEIHTDKTIPANRPDIVFQSKTDKVTYLIDIAIPNDMNIQNTYAGKISKYTDLAIEIKRLWKQNKVVIVPLIMSVSGLTPNTFTPHLQQLGLDEKLHKTFQKSVILKTCSIVRSFLNSE

SEQ ID NO: 32204 - protein, 1208 aa, Callosobruchus maculatus
MDKVSFSNNQRRPRVRRLNSPEPQNQTPQPIAHNPTADVLPVQPATTKAGKPRQRLQWTTEMNKSVMHCYYTATKLETISTGYRRELHRLFTAQYPHLSTRVTEQRLIDQKRVITKNNRLTPQELQAIKSLVSNEINTVPPNDSLADESTTERQNIHSQNSQTPNTDTTNDTSIHSDMDSEHEHIPDTPDQTSINLPLTATQSQKVTPPPSITQSTEQVMDTQYNKWCGTNPALRDPLPRLIFKNNTQQILHTINSNIIPQFLTNVSNLEDIQTVIYAAAATTLTVNGQKLPKRSRDHTSNRPKPKWQIRIENKISAIRKDLAHLAQYTNNNNRSKRIQTTIDILKSKSPQKSIPEIADTLKQKLAVYAARLRRYNESNERKNANNLFQKSEKQFYQKITANNQEATIEPPSRQDLTEFWSSLWSEPKTHNQDAPWIRQEEEKHQHIMEQGDVILTPEEIAETIKHTHNWKCPGVDNIQNFWYKQFSSTYEVLTDQINKAILQPNRLPKFLTQGITYIKPKNTDTKNPANYRPITCLPTLYKIITATICRRIEQHLTQNNILTEEQKGCRKQSQGCKEQLIIDSVIMEQTRKEHRNLHTCFIDYKKAFDSVPHSWLKKTLQIYKINSGLRQFLTRIMETWRTNIHLKTQHGYIQTDELHIRRGIFQGDSLSSLWFCLCLNPLSNALNNTNCGFNIRHEKVNQHKINHLLYMDDIKLYAATEVQLRELLRITEVCTSDVKMEFGMSKCKVLHINKGQWKSHQERETLTGQTLDNMDKGETYKYLGFNQSVKIDHSQVKEQLIQEFRDRLIKLLKTKLNSRNLTKAINTFAIPVITYSFGIIKWSHTDIENIQILIRTELTRHRMSHPNACKERLTIDRKQGGRGIIDIQSLRTKQIKTLRHYFQSKQTNLHRAIVKADKNYTPLTLSSPNHAADTHNPIELQQEKINTWSQKALHGKHRYRITQDHINEKQSYTWLQDGQLFPETEGFMLAIQDQVIATRNYKKYIIKDPSVTNDNCRKCHQQKETIDHITSACKTLAGTEYTARHNSAAKIIHQALATTNKLIENTAPYYNYTPTSVLDNNQYKLYWDVEIHTDKTIPANRPDIVFQSKADKVTYLIDIAIPNDTNVQTAYAGKISKYTDLAIEVKRLWKQNKVVIVPLIMSVSGLTPNTFTPHLHQLGLDEKLHKIFQKSVILKTCSIVRSFLNSDQ

SEQ ID NO: 32205 - protein, 1207 aa, Callosobruchus maculatus
MDRVNFMNNQRRPRVRRLNSPEPQTQTEQPIEHNPAADVLPTQPATTKAGKPRQRLQWTTEMNKSVMRCYYTATKLETISTGYRHELHRLFTTQYPHLSTRVTEQRLIDQKRVITKNNRLTPQELQDIKNLVSNEMNIVQPNDSLTTEQIVETQNSDTQTSQTSNTAKTNNTSIHSELGPEHDQALDTPDTTITNLPSTIIQIQNITRPFAVTQFVEQVMSTQYNKWCGTNPALRDLLPRLIFKNNTQQILHTVNANVIPQFIRDDSNLEDIHTVIYAAAATTLIVNGQKLSKRSKRQTSNRTKPKWQIRIENKISTIRKDLAHLAQYTINNNHPHIQRTINILKSKSPQQTIPEITDTLKQKLAVYAARLRRYNESNARKDANSLFQKSEKQFYQKITADNQITTIEPPSKQELTEFWGSLWSEPKTHNEGAPWIREEEEKHQHIAEQGDVILSKEEIVETIKHTHDWKCPGVDNVQNFWYKHFSSTYEVLTNQINKAIRQPDRLPKFLTQGITYIKPKNADTKNPANYRPITCLPTLYKIITATLCRRIEQHLTQNNILTEEQKGCRKQSQGCKEQLIIDSVIMEQTRKEHRNLHTCFIDYKKAFDSVPHSWLTKILQIYKINPGLRQFLAKTMKTWRTNIHLTTQDGHIQTEELHIRRGIFQGDSLSSLWFCLCLNPLSNALNNTNYGFNIRHQKVNQHRINHLLYMDDIKLYAATDVQLRELLRITEVYTSDVRMEFGMNKCKVLHINKGQWKNHPEQEIVTGQTLDNMDKEETYKYLGFNQSVKIDHTQIKAELRQVFRDRLIKLLKTKLNSRNLTKAINTFAIPILTYSFGIIKWSHTDIENIHILIRTELTKHRMSHPNACKERLTIDRTQGGRGITDIQSLRTRQIKTLRHFFQNKQTNLHRAIVKADKNYTPLNLSCPDHVADTHNPTQSQQEKISTWSQKPLHGKHRYRVTQDHINKKQSYTWLQDGQLFPETEGFMLAIQDQVIATRNYKKYIIKDPSITDDNCRKCQQQKETIDHITSGCKTLAGTEYTARHNSAAKVIHQALATTNKLIENSDPYYNYTPTSVLENDQYKLYWDVQIHTDKTIPANRPDIVFQSKLDKVTYLIDIAIPNDVNIQYTYAGKISKYTDLAMEIKRLWKQDKVTIVPLIMSVSGLTPNTFTPHLQQLGLDEKLHKTFQKSVILKTCNIVRSFLNSDQ

SEQ ID NO: 32206 - protein, 990 aa, Callosobruchus maculatus
MSTQYNKWCGTNPALRDPLPRLIFKNNTQQILHTVNANVIPQFIRDDSNLEDIHTVIYAAAATTLIVNGQKLSKRSKHQTSNRTKPKWQIRIENKISTIRKDLAHLAQYTINNNHPSRHIQRTINILKSKSPQQTIPEITDTLKQKLAVYAARLRRYNESNARKDANSLFQKSEKQFYQKITADNQITTMEPPSKQELTEFWGNLWSEPKTHNEDAPWIREEEEKHQHIAEQGDVILSKEEIVETIKHTHDWKCPGVDNVQNFWYKHFSSTYEVLTNQINKAIRQPDRLPKFLTQGITYIKPKNADTKNPANYRPITCLPTLYKIITATLCRRIEQHLTQNNILTEEQKGCRKQSQGCKEQLIIDSVIMEQTRKEHRNLHTCFIDYKKAFDSVPHSWLTKILQIYKINPGLRQFLAKTMKTWRTNIHLTTQDGHIQTEELHIRRGIFQGDSLSSLWFCLCLNPLSNALNNTNYGFNIRHQKVNQHRINHLLYMDDIKLYAATDVQLRELLRITEVYTSDVRMEFGMNKCKVLHISKGQWKNHPEQEIVTGQTLDNMDKEEMYKYPGFNQSIKIDHTQIKAELRQVFRDRLIKLLKTKLNSRNLTKAINTFAIPILTYSFGIIKWSHTDIENIHILIRTELTKHRMSHPNACKERLTIDRTQGGRGITDIQSLRTRQIKTLRHFFQNKQTNLHRAIVKADKNYTPLNLSCPDHVAGTHNPTQLQQEKISTWSQKPLHGKHRYRVTQDHINKKQSYTWLQDGQLFPETEGFMLAIQDQVIATRNYKKYIIKDPSITDDNCRKCQQQKETIDHITSGCKTLAGTEYTARHNSAAKVIHQALATTNKLIENTDPYYNYTPTSVLENDQYKLYWDVQIHTDKTIPANRPDIVFQSKLDKVTYLIDIAIPNDVNIQNTYAGKISKYTDLAMEIKRLWKQDKVTIVPLIMSVSGLTPNTFTPHLQQLGLDEKLHKTFQKSVILKTCNIVRSFLNSDQ

SEQ ID NO: 32207 - protein, 1232 aa, Callosobruchus maculatus
MGRRSGKKGSLQVQLRYNNNNNNNNNNNKWTTEMNKFVMRCYYTATKLETISTGYRHELHRLFIAQYPHLAERVTEQRLIDQKRVITKNNRLTPQELQAVKKRVANEINTVHPIDSLVTESITETQNIHTRNNQTTNTATTNNISIQSEIDSEHEHTPNTPDITFTNLPATTTQSQQISQPRSVTQSAEAVNTAQPPSISGEPEQMTNSRTTQFNKRCNTTTQNQNQNIARSPSITQTAEQVMNTQFNKWCGTNPALRDPLPRLIFKNNTQQILHTINTNLIPQFITNNSNLEDIHTVIYAAAATTLIVNGQKLQKRSKDQRSNRAKPKWQIRIENKISTLRKDLAHLAQYSNNNNHPSKHIQRTINILKSKSPQKSIPETADTLKQKLAVYAARLRRYNESNDRKDANNLFQKSEKQFYQIITSNNQITTIEPPSRQELTAFWRSLWSEPKTHNENAPWIRQEETKHQHITEQGNVILTTEEIAETIKHTHNWKCPGVDNVQNFWYKQFSSTYEMLTDQINKAILQPNRLPKFLTQGITYIKPKNADTKNPANYRPITCLPTLYKIITATICRRIEQHLMQNNILTEEQKGCRKHSQGCKEQLIIDSVIMEQTRKEHRNLHTCFIDYKKAFDSVPHSWLMKTLQIYKINPGLRQFLKSTMETWRTNIHLQTHDGHIQTDELHIRRGIFQGDSLSSLWFCLCLNPLSNTLNSTNHGFNIRHHKADQHKINHLLYMDDIKLYAATEVQLRELLKITEVYTSDIRMEFGMSKCKVLHINKGQWKNQPEKEVVTGQPLDNMDKDETYKYLGFNQNVKIDHTQVKAQLTQEFKDRLIKLLKTKLNSKNLTKAINTFAIPVLTYSFGIIKWSHTDIENIHILIRTELTKHRMSHPNACKERLAIDRKLGGRGIIDIQSLRTTQIQTLRHFFHTKQTNLHKAIVKADKNYTPLNLSSPDHVADTYNHIQSQQEKINAWSQKALHGKHRYRVTQDHINQKQSYAWLQDGQLFPETEGFMLAIQDQVIATRNYKKYIIKDPSITDDNCRKCQQQKETIDHITSGCKTLAGTEYTARHNSAAKVIHQALATTNKLIENTDPYYNYTPTSVLENDQYKLYWDVEIHTNKTIPANRPDIVFQSKADKITYLIDIAIPNDVNIQNTYAGKISKYTDLAMEIKRLWKQNKVTIVPLIMSVSGLTPSTFTQHLQQLGLDEKLHKVFQKSVILKTCNIVRSFLNSDQ

SEQ ID NO: 32208 - protein, 1148 aa, Callosobruchus maculatus
MKIIIITVTEQRLIDQKRVITKNNRLTPEELQAIKILVSNEINTAHPNHPQTSNRTTIDNTSIHSETDPEHEHTQHIPDSAVQPNDSLATESITERHAIRTRNNQPPNTGTTNTTSIHLELDLENDHTPETTCTNLPSTATQSQNITLPPAITQSAEQVMNTQYNKWCGTNPTLRDPLPRLIFKNNTLQILHTINVNIIPQFLTKDSDLEDIHTVIYAAAATALTLNGQRLPKRSITRTTERSKPKWQVRIENKISTIRKDLAHLAQYTNNNNRSKRVQTTINILKSKSPQQTIPEIADTLKQKLAVYAARLRRYNESNARKDANNLFQKSEKQFYQKITADNQITAIEPPSKQELTEFWGSLWSEPKTHNENAPWIRQEEEKHQHIVEQEDVILTPEEIAETIKHTHNWKCPGVDNVQNFWYKQFSATYEMLTDQINKAILQPNRLPKFLTQGITYIKPKNADTKNPANYRPITCLPTLYKIITATICRRIEQHLTQNNILTEEQKGCRKQSQGCKEQLIIDSVIMEQTRKEHRNLNACFIDYKKAFDSVPHSWLAKTLQIYKINPGLREFLTSTMETWRTSIHLKTQDGLIKTDELHIRRGIFQGDSLSSLWFCLCLNPLSNALNNTNCGFNIRHDRFNQHKINHLLYMDDIKLYAANEVQLKELIRTTEACSSDIRMEFGMSKCKVLHINKGQWKDHPQQETVAGQTLNNMNKDETYKYLGFNQNVKIDHTQVKAQLTQEFRDRLIKLLKTKLNSRNLTKAINTFAIPVLTYSFGIIKWSHTDIENIHILIRTELTKHRMSHPNACKVRLTIDRKQGGRGITDIQSLRTRQIKTLRHFFQNKQTNLHRAIVKADKNYTPLNLSCPDHVADTHNPTQSQQEKISTWSQKPLHGKHRYRITQDHINEKQSYTWLQDGQLFPETEGFMLTIQDQVIATRNYKKYVIKDPSITNDNCRKCQQQKETIDHITSACKTLAGTEYTARHNSAAKIIHQALATKNKLIENSDPYYKYTPTSVLENDHYKLYWDVEIHTDKTINANRPDIVFQIKADKVTYLIDIAIPNDVNVQNTYAGKISKYTDLAIEVKRIWKQDKVIIVPFIMSVSGLTPNTFTQHLQQLGLDESLHKIFQKSVILKTCNIVRSFLNSDQ

SEQ ID NO: 32209 - protein, 1247 aa, Callosobruchus maculatus
MDKVTFAKNQRRPRVRRLNSPEPQIQTPEQPIAPNPAADVLPVQPATTKAGKPRQRLQWTTEMNKSVMHCYYTATKLETISTGYRHEFHRLFTAQYPHLSTRVTEQRLIDQKRVIMKNNRLTPLELQTIKNLVADEINTVPPNDSLASESVAETQHIHTRNNQSPNTDTTDKTSKKDPVSNEINIVGSITETQNIQSPNNHTPDTTTFNKTNIHFETNPEHEQTPDIPNTTFTNSPSTTTQNRNINRPPSTTQSAEEVMNIQFNKWCGTNPTLRDPLPRLIFKNNTQQILHSINANVIPQFITNDSTLEDIHTVIYAAAATTLILNGQKLPKRSTDHTSERSKPKWQIRIENKISAIRKDLAHLAQYTNNNNPSKRVQRTVNILKSKSPQQTVPEIADTLKQKLAVYAARLRRYNESNARKDANNLFQKSEKQFYQKITSDNQITTIEPPSKQELTEFWGSLWSEPKTHNEDAPWIKQEEQKHQHIEEQGDIILTPEEIAETIKHTHNWKCPGVDNIQNFWYKRFSATYEMLANQINKAIIQPETFPKFLTQGITYIKPKNADTKNPANYRAITCLPTLYKIVTSTICRRIEQHVTQNSILTEEQKGCRKQSQGCKEQLIIDSVIMEQTRKEHRSLHTCFIDYKKAFDSVPHSWLTKILQIYKINPGIRRFLTRTMETWRTHIHLKTQDGHIQTEELNIRRGIFQGDSLSSLWFCLCLNPLSNALNSTNYGFNIRHQKANQHRINHLLYMDDIKLYAATDVQLRELLRITEVCTSDVRMEFGMSKCKVLHINKGQWKNHPQQEIVTGQTLDNMDKEETYKYLGFNQSVKIDHTQTKAQLRQVFRDRLVKLLKTKLNSRNLTKAINTFAIPILTYSFGIIKWSHTDIENIHILIRTELTKHRMSHPNACKERLTIDRKQGGRGIIDIQSLHSRQIKTLRHFFQSKQTNLHRSIVKADKNYTPLNLSCPDHAADTYNHIQSQQEKINTWSQKALHGKHRYRVTQDHINERQSYTWLHDGQLFPETEGFMLAIQDQVIATQNYKKYIIKDPSITDDNCRKCHQQKETIEHITSGCKTLAGTEYTARHNSAAKVIHQALATTNKLIENTDPYYNYTPTSVLENNQYKLYWDVEIHTDKTIPANRPDIVFQSKLDKVTYLIDIAIPNDVNIQNTYAGKISKYTDLAMEIKRLWKQDKVTIVPFIMSVSGLTPNTFTPHLQQLGLHERLHKTFQKSVILKTCNIVRSFLNSDQ

SEQ ID NO: 32210 - protein, 1245 aa, Callosobruchus maculatus
MHKVTSKNNQRRPRVRRLNSPEPPTQTEQPRDHNPAADVLPAQPATTKAGKPRQRLQWTTEINKHVMHCYYNATKLETISTGYRHELHRLFIAQYPHLAERVTEQRLIDQKRVITKNNRLTPEELQAIKILVSNEINTAHPNHPQTSNKTTIDNSSIHSETNPEHEHTQHIPDTAAQPNDSLATEPITERHSIRTRNNQPPNTGTINNTSIHLELDLENDHTPDAPETTCTNLPSTATQSQNITLPPAITQSAEQVMNTQYNKWCGTNPTLRDPLPRLIFRNNTLQILHTINVNIIPQFLTKDSDLEDIHTVIYAAAATTLTLNGQKLPKRSIARTTERSKPKWQIRIENKISTIRKDLAHLAQYTKNNNRSKRVQTTINILKSKSPQQTIPEIADTLKQKLAVYAARLRRYNESNARKDANNLFQKSEKQFYQKITADNQITAIEPPSKQELTEFWGSLWSEPKTHNGNAPWIRQEEEKHQHIVEQGDVILTPEEIAETIKHTHNWKCPGVDNVQNFWYKQFSATYEMLTDQINKAILQQNRLPKFLTQGVTYIKPKNADTKNPANYRPITCLPTLYKIITATICRRIEQHLTQNNILTEEQKGCRKQSQGCKEQLIIDNVIMEQTRKEHRNLHTCFIDYKKAFDSVPHSWLAKTLQIYKINPGLREFLTRTMETWRTSIHLKTQDGHIKTDELHIRRGIFQGDSLSSLWFCLCLNPLSNALNNTNCGFNIRHERLNQHKINHLLYMDDIKLYAANEVQLRELIRITETCSSDVRMEFGLSKCKVLHINKGRWKDHPQQETVAGQTLNNMNKDETYKYLGFNQNVKIDHTQVKAQITQEFRDRLIKLLKTKLNSRNLTKAINTFAIPVLTYSFGIIKWSHTDIENIHILIRTELTKHRMSHPNACKERLTIDRKQGGRGITDIQSLRTRQIKTLRHFFQNKQTNLHRAIVKADKNYTPLNLSCPDHVADTHNPTQSQQEKISTWSQKPLHGKHRYRITQDHINEKQSYTWLQDGQLFPETEGFMLAIQDQVIATRNYKKYVIKDPSITDDNCRKCHQQKETIDHITSGCKTLAGTEYTARHNSAAKVIHQALAKTNKLIENTDPYYNYTPTSVLENDRYKLYWDVEIHTDKTIPANRPDIVFQSKADKITYLIDIAIPNDVNIQNTYAGKISKYTDLAMEIKRLWKQNKVTIVPLIMSVSGLTPNTFTQHLQQLGLDQKLHKVFQKSVILKTCNIVRSFLNADQ

SEQ ID NO: 32211 - protein, 1245 aa, Callosobruchus maculatus
MHKVTSKNNQRRPRVRRLNSPEPQTQTEQPREHNPAADVLPAQPATTKAGKPRQRLQWTTEINKHVMHCYYTATKLETISTGYRHELHRLFIAQYPHLAERVTEQRLIDQKRVITKNNRLTPEELQAIKILVSNEINTAHPNHPQTSNKTIIDNTSIHSETDPEHEHTQHIPDTAVQPNDSLATESITERHAIRTRNNQPPNTGTTNNTSIHLELDLENDHTPDTPETTCTNLPSTATQSQNVTIPPAITQSAEQVMNTQYNKWCGTNPTLRDPLPRLIFKNNTLQILHTINVNIIPQFLTKDSDLEDIHTVIYAAAATTLTLNGQKLPKRSIARTTERSKPKWQIRIENKISTIRKDLAHLAQYTNNNNSSKRVQTTINILKSKSPQQTIPEIADTLKQKLAVYAARLRRYNESNARKDANNLFQKSEKQFYQKITADNQITAIEPPSKQELTEFWGSLWSEPKTHNENAPWIRQEEEKHQHIVEQGDVILTPEEIAETIKHTHNWKCPGVDNVQNFWYKQFSATYEMLTDQINKAILQPNRLPKFLTQGITYIKPKNADTKNPANYRPITCLPTLYKIITATIGRRIEQHLTQNNILTEEQKGCRKQSQGCKEQLIIDNVIMEQTRKEHRNLHTCFIDYKKAFDSVPHSWLAKTLQIYKINPGLREFLTRTMETWRTSIHLKTQDGLIKTDELHIRRGIFQGDSLSSLWFCLCLNPLSNALNNTNCGFNIRHDRLNQHKINHLLYMDDIKLYAANEVQLKELIRTTEACSSDVRMEFGMSKCKVLHINKGQWKDHPQQETVAGQTLNNMNKDETYKYLGFNQNVKIDHTQVKAQLTQEFRDRLIKLLKTKLNSRNLTKAINTFAIPVLTYSFGIIKWSHTDIENIHILIRTELTKHRMSHPNACKERLTIDRKQGGRGITDIQSLRTRQIKTLRHFFQNKQTNLHRAIVKADKNYTPLNLSCPDHVADTHNPTQSQQEKISTWSQKPLHGKHRYRITQDHINEKQSYTWLQDGQLFPETEGFMLAIQDQVIATRNYKKYVIKDPSITNDNCRKCQQQKETIDHITSACKTLAGTEYTARHNSAAKIIHQALATKNKLIENSDPYYKYTPTSVLENDHYKLYWDVEIHTDKTINANRPDIVFQIKADKVTYLIDIAIPNDVNVQNTYAGKISKYTDLAIEVKRIWKQDKVIIVPLIMSVSGLTPNTFTQHLQQLGLDESLHKIFQKSVILKTCNIVRSFLNSDQ

SEQ ID NO: 32212 - protein, 989 aa, Callosobruchus maculatus
MNTQYNKWCGTNPVLRDPLPRLIFKNNTRQILHTINANIIPQFLTNDSDLEDIHTVIYAAAATTLIVNGQKLPKRSKNHTSKRSKPKWQIRIENKISTLRKDLAHVTQYTNNNNLSKRIQTTINRLKSKSPQQTIPEIADTLKQKLAVYAARLRRYNESNDRKDANNLFQKSEKQFYQKMTSNNQITTTEPPSRQELTEFWGSLWSEPKTHNENAPWIRREEEKHQHIAEQGDVVFTPDEIAETIKHTHNWKCPGVDNVQNFWYKQFSATYEMLTEQINKAILQPNRLPKFLTQGITYIKPKNGDTRNPANYRPITCLPTLYKIITATIGKRIEQHLTQNNILTEEQKGCRKQSQGCKEQLIIDSVIMEQTRKEHRNLHTCFIDYKKAFDSVPHSWLTKTLQIYKINPVLRQFLTRTMETWRTNIHLKTQDGHIQTEELLIRRGIFQGDSLSSLWFCLCLNPLSNALNNTNYGFNIRHQKVNQHRINHLLYMDDIKLYAATEVQLKELLRITEVCTSDVRMEFGMSKCKVLHINKGQWKNQSEQEILTGETLDNMDKDETYKYLGFNQNIKIDHTQAKAQLTQEFRNRLLKLLKSKLNSKNLTKAINTFAIPVLTYSFGIIKWSHTDIENIHILIRTELTKHRMSHPNACKDRLTIDRKQGGRGIIDIQSLHTRQIKTLRDFFQSKQTNLHRSIVKADKNYTPLNLSRSDHSADGHNHIELQQEKINTWSQKALHGKHRYRVTQEHINERQSYTWLQDGQLFPETEGFMLAIQDQVIATRNYMKYIIKDTSITDDNCRKCHQQKETIDHITSGCKTLAGTEYTARHNSAAKVIHQALATTNKLIENTDPYYNYTPTSVLENNEYKLYWDVEIHTDKTIPANRPDIVFQSKADKVTYLIDIAIPNDTNIQNAYAGKISKYTDLAIEIKRLWKQNKVTIVPLIMSVSGLTPNTFTPHLQQLGLDEKLHKIFQKSVILKTCNIVRSFLNSDP

SEQ ID NO: 32213 - protein, 1027 aa, Callosobruchus maculatus
MTNSRTTQFNKRCNTTTQNQNQNIARSPSITQTAEQVMNTQFNKWCGTNPALRDPLPRPIFKNNTQQILHTINTNLIPQFITNNSNLEDIHTVIYAAAATTLIVNGQKLQKRSKDQRSNRAKPKWQIRIENKISTLRKDLAHLAQYSNNNNHPSKHIQRTINIMKSKSPQKSIPEIADTLKQKLAVYAARLRRYNESNDRKDANNLFQKSEKQFYQKITSNNQITTIEPPSRQELTAFWRSLWSEPKTHNENAPWIRQEETKHQHITEQGNVILTTEEIAETIKHTHNWKCPGVDNVQNFWYKQFSSTYEMLTDQINKAILQPNRLPKFLTQGITYIKPKNADTKNPANYRPITCLPTLYKIITATICRRIEQHLMQNNILTEEQKGCRKHSQGCKEQLIIDSVIMEQTRKEHRNLHTCFIDYKKAFDSVPHSWLMKTLQIYKINPGLRQFLKSTMETWRTNIHLQTHDGHIQTDELHIRRGIFQGDSLSSLWFCLCLNPLSNTLNSTNHGFNIRHHKADQHKINHLLYMDDIKLYAATEVQLRELLKITEVYTSDIRMEFGMSKCKVLHINKGQWKNQPEKEVVTGQPLDNMDKDETYKYLGFNQNVKIDHTQVKAQLTQEFKDRLIKLLKTKLNSKNLTKAINTFAIPVLTYSFGIIKWSHTDIENIHILIRTELTKHRMSHPNACKERLAIDRKLGGRGIIDIQSLRTTQIQTLRHFFHTKQTNLHKAIVKADKNYTPLNLSSPDHVADTYNHIQSQQEKINTWSQKALHGKHRYRVTQDHINQKQSYAWLQDGQLFAETEGFMLAIQDQVIATRNYKRYIIKDPSITDDNCRKCQQQKETIDHITSGCKTLAGTEYTARHNSAAKVIHQALATTNKLIENTDPYYNYTPTSVLENDQYKLYWDVEIHTDKTIPANRPDIVFQSKADKITYLIDIAIPNDVNIQNTYAGKISKYTDLAMEIKRLWKQNKVTIVPLIMSVSGLTPSTFTQHLQQLGLDEKLHKVFQKSVILKTCNIVRSFLNSDQ

SEQ ID NO: 32214 - protein, 1200 aa, Callosobruchus maculatus
MDKVSFSNNQRRPRVRRLNSPEPQNQTQQPTAHNPTADVLPVQPATTKAGKPRQRLQWTTEMNKSVMHCYYTATKLETISTGYRHELYRLFTAQYPHLSTRVTEQRLIDQKRVITKNNRLTPQELQAIKSLVSDEINTVTPNASLADESITERQNNHTRSNQTPNTDTTNNTSIHLDVDSEHEHTPDTPNQTSINLPSTATQSQNVTPPPCITQSTEQVMNTQYNKWCGTNPTLRDPLPRLIFKNNTRQILQTVNSNIIPQFLTKDSNLEDIHTVIYAAAATTLIVNGQKLPKRSKDHTSKRSKPKWQIRIENKISTIRKDLAHVTQYIHKNNLSKRIQTTINRLKSRSPQQTISEIYDTLKQKLAVYAARLRRYNESNDRKDTNNLFQKSERQFYQKITSNNQITTIEPPSRKELTDFWGSLWSEPKTHNENAPWIRQEEEKQQHIPEQGDVILTPQEIAETIKHTHNWKCPGVDNVQNFWYKQFSATYEILTDQINKAILQPNRLPKFLTQGVTYIKPKNADTKNPANYRPITCLPTLYKIITATIGKRIEQHLTQNNILTEEQKGCRKQSQGCKEQLIIDSVIMEQTRKEHRNLHTCFIDYKKAFDSVPHSWLTKTLQIYKINPTLRQFLTRTMETWRTNIHLKTQDGHIQTEELCIRRGIFQGDSLSSLWFCLCLNPLSNALNNTNYGFNIRHQKVNQHRISHLLYMDDIKLYAATEVQLKELLKITEVCTSDVRMEFGMSKCKVLHIHKGQWKNHSEQEILTGQTLDNMEKDETYKYLGFNQNIKINHSEVKAQLTQEFRDRLITLLKTKLNSKNLTKAINTFAIPVLTYSFGIIKWSHTDIENINILIRTELTKHRMSHPKACKERLTIDRKHGGRGIIDIQSLHTRQIKTLRDFFQSKETNLHRSIVKADKNYTPLTLSRPDHPADSHNHIELQQEKINTWSQKALHGKHRYRVTQDHINERQSYTWLQDGQLFPETEGFMLAIQDQVIATRNYMKYIIKDTSITDDNCRKCHQQKETIDHITSACKTLAGTEYTARHNSAAKVIHQALATTNKLIDNTDPYYNYTPTSVLENDEYKLYWDVEIHTDKTIPANRPDIVFQSKADKVTYLIDIAIPNDTNIQNAYAGKISKYTDLAIEIKRLWKQNKVTIVPLIMSVSGLTPNTFTPHLQQLGLDERLHKIFQKSVILKTCNIV

SEQ ID NO: 32215 - protein, 1209 aa, Callosobruchus maculatus
MDRVNFMNNQRRPRVRRLNSPEPQTQTEQPIEHNPAADVLPTQPATTKAGKPRQRLQWTTEMNKSVMRCYYTATKLETISTGYRHELHRLFTTQYPHLSTRVTEQRLIDQKRVITKNNRLTPQELQDIKDLVSNEMNIVQTNDSLTTEQIVETQNSDTQTSQTSNTAKTNNTSIHSELGPEHDQALDTPDTTITNLPSTIIQIQNITRPFAVTQSVEQVMSTQYDKWCGTNPALRDPLPRLIFKNNTQQILHTVNANVIPQFIRDDSNLEDIHTVIYAAAATTLIVNGQKLSKRSKHQTSNKTKPKWQIRIENKISTIRKDLAHIAQYTINNNHPSRHIQRTINILKSKSPQQTIPEITDTLKQKLAVYAARLRRYNESNARKDANSLFQKSEKQFYQKITADNQITTIEPPSKQELTEFWGSLWSEPKTHNEDAPWIREEEEKHQHIAEQGDVILSKEEIVETIKHTHDWKCPGVDNVQNFWYKHFSSTYEVLTNQINKAIRQPDKLPKFLTQGITYIKPKNADTKNPANYRPITCLPTLYKIITATLCRRIEQHLTQNNILTEEQKGCRKQSQGCKEQLIIDSVIMEQTRKEHRNLHTCFIDYKKAFDSVPHSWLTKILQIYKINLGLRQFLAKTMKTWRTNIHLTTQDGHIQTEELHIRRGIFQGDSLSSLWFCLCLNPLSNALNNTNYGFNIRHQKVNQHRINHLLYMDDIKLYATSDVQLRELLRITEVYTSDVRMEFGMNKCKVLHINKGQWKNHPEQEIVTGQTLDNMDKEETYKYLGFNQSVKIDHTQIKAELRQVFRDRLIKLLKTKLNCRNLTKAINTFAIPILTYSFGIIKWSHTDIENIHILIRTELTKHRMSHPNACKERLTIDRTQGGRGITDIQSLRTRQIKTLRHFFQNKQTNLHRAIVKADKNYTPLNLSCPDHVVDTHNPTQSQQEKISTWSQKPLHGKHRYRVTQDHINKKQSYTWLQDGQLFPETEGFMLAIQDQVIATRNYKKYIIKDPSITDDNCRKCQQQKETIDHITSGCKTLAGTEYTARHNSAAKVIHQALATTNKLIENTDPYYNYTPTSVLENDQYKLYWDVQIHTDKTIPANRPDIVFQSKLDKVTYLIDIAIPNDVNIQNTYAGKISKYTDLAMEIKRLWKQDKVTIVPLIMSVSGLTPNTFTPHLQQLGLDEKLHKTFQKSVILKTCNIVRSFLNSDQ

SEQ ID NO: 32216 - protein, 731 aa, Callosobruchus maculatus
MQNFWYKHFSSTYEVLTNQINKAIRQTDRLPKFLTQGITYIKPKNADTKNPANYRPITCLPTLYKIITATLCRRIEQHLTQNNILTEEQKGCRKQSQGCKEQLIIDSVIMEQTRKEHRNLHTCFIDYKKAFDSVPHSWLTKILQIYKINPGLRQFLAKTMKTWRTNIHLRTQDGHIQTEELHIRRGIFQGDSLSSLWFCLCLNPLSNALNNTNHGFNIRHQKVNQHRINHLLYMDDIKLYAATDMQLRELLRITEDSTSDVRMEFGINKCKVLHINKGQWKNHPEQEIVTGQTLDNMDKEETYKYLGFNQSVKIDHTQVKAELRQVFRDRLIKLLKTKLNSRNLTKAINTFAIPILTYSFGIIKWSHTDIENIHILIRTELTKHRMSHPNACKERLTIGRTQGGRGITDIQSLRTRQIKTLRHFFQNKQTNLHRAIVKADKNYTPLNLSCPDHVADTHNPTQSQQEKISTWSQKPLHGKHRYRVTQDHINKRQSYTWLQDGQLFPETEGFMLAIQDQVIATRNYKKYMIKDPSITDDNCRKCQQQKETIDHITSGCKTLAGTEYTARHNSAAKVIHQALATTNKLIENTDPYYNYTPTSVLENDQYKLYWDVQIHTGKTIPANRPDIVFQSKLDKVTYLIDIAIPNDVNIQNTYAGKISKYTDLAMEIKRLWKQDKVTIVPLIMSVSGLTPNTFTPHLQQLGLDEKLHKTFQKSVIPNTCNIVRSFLNSDQ

SEQ ID NO: 32217 - protein, 1240 aa, Callosobruchus maculatus
MHKVTSKNNQRRPRVRRLNSPEPQTLTEQPREHNPAADVLPAQPATTKAGKPRQRLQWTTEINKHVMHCYYTATKLETISTGYRHELHRLFIAQYPHLAERVTEQRLIDQKRVITKNNRLTPEELQAIKILVSNEINKAHPTHTQTSNKTTIDSTSIHSETDLEHVPDTAVQPNDSLANELITERHAIRTRNNQPPDTGTTNDTSIHLELDLENDHTPDTPETTCTNLPSTTTQIQNVTIPPAITQSAEQVMNTQYNKWCGTNPTLPDPLPRLIFKNNTLQILHTINVNIIPQFLTKDSDLEDIHTVIYAAAATTLTLNGQKIPKRSIARTTERSKPKWQIRIENKISTIRKDLSHLAQYTINNNRSKRIQTTINILKSKSPQQTISEIADTLKQKLAVYAARLRRYNESNARKDANNLFQKSEKQFYQKITADNQITAIEPPSKQELTEFWGSLWSEPKTHNENAPWIRQEEEKHQHIVEQGDVILTPQEIAETIKHTHNWKCPGVDNVQNFWYKQFSAIYEMLTDQINKAILQPNRLPKFLTQGITYIKPKNADTKNPANYRPITCLPTLYKIITATICRRIEQHLAQNNILTEEQKGCRKQSQGCKEQLIIDNVIMEQTRKEHRNLHTCFIDYKKAFDSVPHSWLAKTLQIYKINPGLREFLTRTMETWRTSIHLKTQDDHIKTDELHIRRGIFQGDSLSSLWFCLCLNPLSNALNNTNCGFNIRHDKLNQHKINHLLYMDDIKLYAANEVQLRELIRITGACSSDVRMEFGLSKCKVLHINKGQWKDHPQQETVTGQTLNNMNKDETYKYLGFNQNVKIDHTQVKAQLTQQFKDRLIKLLKTKLNSRNLTKAINTFAIPVLTYSFGIIKWSHTDIENIHILIWTELTKHRMSHPNACKERLTIDRTQGGRGITDIQSLRTRQIQTLRHFFQNKQTNLHRAIVKADKNYTPLNLSCPDHVADTHNPTQSQQEKISTWSQKPLHGKHRYRVTQDHINKKQSYTWLQDGQLFPETEGFMLAIQDQVIATRNYKKYIIKDPSITDDNCRKCQQQKETIDHITSGCKTLAGTEYTARHNSAAKVIHQALATTSKLIENTDPYYNYTPTSVLENEQYKLYWDVEIHTDKTIPANRPDIVFQSKADKITYLIDIAIPSDVNIQNTYAGKISKYTDLAIEIKRLWKQNRVTIVPLIMSVSGLTPNTFTQHLQQLGLDEKLHKVFQKSVILKTCNIVRSFLNSDQ

SEQ ID NO: 32218 - protein, 989 aa, Callosobruchus maculatus
MNTQYNKWCGTNPTLRDPLPRLIFKNNTLQILHTINVNIIPQFLTKDSDLEDIHTVIYAAAATALTLNGQKLPKRSIARTTERSKPKWQIRIENKIITIRKDLAHLAQYTNNNNRSKRVQTTINMLKSKSPQQTIPEIADTLKQKLTVYAARLRKYNESNARKDANNLFQKSEKQFYQKITADNQITAIEPPSKQELTEFWGSLWSEPKTHNENAPWIRQEEEKHQHIVEQEDVILTPEEIAETIKHTHNWKCPGVDNVQNFWYKQFSATYEMLTDQINKAILQPDRLPKFLTQGITYIKPKNADTKNPANYRPITCLPTLYKIITAAICRRIEQHLTQNNILTEEQKGCRKQSQGCKEQLIIDSVIMEQTRKEHRNLHTCFIDYKKAFDSVPHSWLAKTLQIYKINPGLREFLASTMETWRTSIHLKTQDGLIKTDELHIRRGIFQGDSLSSLWFCLCLNPLSNALNNTNCGFNIRHDRLNQHKINHLLYMDDIKLYAANEVQLKELIRTTEACSSDVRMEFGMSKCKVLHINKGQWKDHPQQETVTGQTLNNMNKDETYKYLGFNQNVKIDHTQVKAQLTQEFRDRLIKLLKTKLNSRNLTKAINTFAIPVLTYSFGIIKWSHTDIENIHILIRTELTKHRMSHPNACKERLTIDRKQGGRGITDIQSLRTRQIKTLRHFFQNKQTNLHRAIVKADKNYTPLNLSCPDHVADTHNPTQSQQEKISTWSQKPLHGKHRYRITQDHINEKQSSTWLQDGQLFPETEGFMLAIQDQVIATRNYKKYVIKDPSITNDNCRKCQQQKETIDHITSACKTLAGTEYTARHNSAAKIIHQALATKNKLIENSDPYYKYTPTSVLENDHYKLYWDVEIHTDKTINANRPDIVFQIKADKVTYLIDIAIPNDVNVQNTYAGKISKYTDLAIEVKRIWKQDKVIIVPFIMSVSGLTPNTFTQHLQQLGLDESLHKIFQKSVILKTCNIVRSFLNSDQ

SEQ ID NO: 32219 - protein, 989 aa, Callosobruchus maculatus
MNTQYNKWCGTNPTLRDPLPRLIFKNNTRQILQTVNSNIIPQFLTKDSNLEDIHTVIYAAAATTLIVNGQKLPKRSKDHTSRRSKPKWQFRIENKISTIRKDLAHVTQYIHKNNLSKRIQTTINRLKSRSPQQTISEIYDTLKQKLAVYAARLRRYNESNDRKDTNNLFQKSERQFYQKITSSNQITTIEPPSRKELTDFWGSLWSEPKTHNENAPWIRQEEEKQQHIPEQGDVILTPQEIAETIKHTHNWKCPGVDNVQNFWYKQFSTTYEILTDQINKAILQPNRLPKFLTQGVTYIKPKNADTKNPANYRPITCLPTLYKIITATIGKRIEQHLTQNNILTEEQKGCRKQSQGCKEQLIIDSVIMEQTRKEHRNLHTCFIDYKKAFDSVPHSWLTKTLQIYKINPTLRPFLTRTMETWRTNIHLKTQDGHIQTEELCIRRGIFQGDSLSSLWFCLCLNPLSNALNNTNYGFNIRHQKVNQHRISHLLYMDDIKLYAATEVQLKELLKITEVCTSDVRMEFGMSKCKVLHIHKGQWKNHSEQEILTGQTLDNMEKDETYKYLGFNQNIKIDHSEVKAQLTQEFRDRLITLLKTKLNSKNLTKAINTFAIPVLTYSFGIIKWSHTDIENINILIRTELTKHRMSHPKACKERLTIDRKHGGRGIIDIQSLHTRQIKTLRDFFQSKETTLHRSIVKADKNYTPLTLSRPDHPADAHNHIELQQEKINTWSQKALHGKHRYRVTQDHINERQSYTWLQDGQLFPETEGFMLAIQDQVIATRNYMKYIIKDTSITDDNCRKCHQQKETIDHITSACKTLAGTEYTARHNSAAKVIHQALATTNKLIENTDPYYNYTPTSVLENNEYKLYWDVEIHTDKTIPANRPDIVFQSKADKVTYLIDIAIPNDTNIQNAYAGKISKYTDLAIEIKRLWKQNKVTIVPLIMSASGLTPNTFTPHLQQLGLDERLHKIFQKSVILKTCNIVRSFLNSEP

SEQ ID NO: 32220 - protein, 996 aa, Callosobruchus maculatus
MTKYNRIEPNPAKNDRNNNNNNNNNKPRLIFKNNTRQILHTINANIIPQFLTNDSDLEDIHTVIYAAAATTLIVNGQNLPKRFKNHTNKRSKPRWPIRIENKISTLRKDLAHLTQYTNNNNLSKRIQTTIDRLKSKSPQQTIPEITDTLKQKLAVYAARLRRYNESNARKDANSLFQKSEKQFYQKITADNQITTIEPPSKQELTEFWGSLWSEPKTHNDNAPWIRQGEEKQQHIPEQGDVILTPQEIAETINHTHNWKCPGVDNVQNFWYKQFTATHELLTNQINKALLQPNRLPKFLTQGITYIKPKNAETKNPANYRPITCLPTLYKIITATIGKRIEQHLTQNNILTEEQKGCRKQSQGCKEQLIIDSVIMEQTRKEHRNLHTCFIDYKKAFDSVPHSWLKKTLEIYKINPGLRQFLTKTMETWRTNIYLQTEDGHIQTDELHIRRGIFQGDSLSSIWFCLCLNPLSSTLNDTNCGSTIRHQKVNLHKINHLLYMDDIKLYAATEVQLRELLRITEVCTSDMRMEFGMSKCKVLHINKGQWKNHPQQEVVTGQTLDNMDKDETYKYLGFNQNVKIDHTQVKAQLTREFKDRLIKLLKTKLNSKNLTKAINTFAIPVLTYSFGIIKWSHTDIENIHILIRTELTKHRMSHPNTCKERLTIDRKLGGRGFIDIQSLRTTQIQTLRHFFHTKQTNLHKAIVKADKNYTPLNLSSPDHAADKYDHIQSQQEKINTWSQKALHGKHRYRVTQDHINQKQSYTWLQDGQLFPETEGFMLAIQDQVIATRNYKKYIIKDPSITDDNCRKCQQQKETVDHITSGCKTLAGTEYTARHNSAAKVIHQALATTSRLIENTDPYYNYTPTSVLENDQYKLYWDVEIHTDKTIPANRPDIVFQSKADKITYLIDIAIPNDVNIQNTYAGKISKYTDLAMEIKRLWKLNKVTIVPLIMSVSGLTPNTFTQHLQQLGLDEKLHKVFQKSVILKTCNIVRSFLNSDQ

SEQ ID NO: 32221 - protein, 899 aa, Callosobruchus maculatus
MRIENKITTIRKELAHLAQYTNNNNRSKRIQTTIDILKSKSPQKSIPEITDTLKQKLAVYAARLRRYNESNDRKDANNLFQKSEKQFYKKITTDNQITAIELPNKQELTEFWGSLWSEPKTHNENAPWIRQEEEKHQHIAEQGDVILTPEEIAETIKHTHNWKCPGVDNIQNFWYKQFSSVYEVLTDQINKAILQPNRLPKFLTQGITYIKPKYADTKNPANYRPITCLPTLYKIITATICRRIEKHLTENSILTEEQKGCRKQSQGCKEQLIIDSVIMEKTRKEHRNLHTCFIDYKKAFDSVPHSWLTKTLQIYKINPGLRQFLTRTMETWRTNIHLQTEDGHIQTDELHIRRGIFQGDSLSSLWFCLCLNPLSNTLNSTNCGFTIRHQKANQHKINHLLYMDDLKLYAATEVQLRELLRITEVCTSDIKMEFGMSKCKVLHINKGQWKNHPEQEVVTGQALDNMDKNETYKYLGINQNAKIDHTKIKSQLTQEFKDRLIRLLKTKLNSRNLTKAINTFAIPILTYSFGIIKWSHTDIENIHILIRTELTKHRMSHPKACKERLTIDRKQGGRGIIDIQSLHAKQIKSLRHFFHSKQTNLHKAIVKADKNYTPLALSCPDHAADAHNHIKAQQEKINTWSQKALHGKHRYRVTQDHINEKQSYTWLQDGQLFPETEGFMLAIQDQVIATRNYRKYIVKDPSISDDNCRKCHQQKETIEHITGGCKTLAGTEYTARHNSAAKVIHQALATTNKLIENTDPYYNYTPTSVLENNQFKLYWDIEIHTDKTIPANRPDIVFQSKTDKVTYLIDIAIPNDMNIQNTYAGKISKYTDLAIEIKRLWKQNKVVIVPLIMSVSGLTPNTFTPHLQQLGLDEKLHKTFQKSVILKTCSIVRSFLNSE

SEQ ID NO: 32222 - protein, 717 aa, Callosobruchus maculatus
MLTDQINKAILQPNRLPKFLTQGVTYIKPKTADTKNPANYRPITCLPTLYKIITATIGKRIEQHLTQNNILTEEQKGCRKQSQGCKEQLIIDSVIMEQTRKEHRNLHTCFIDYKKAFDSVPHSWLTKTLQIYKINPTLRQFLTRIMETWRTNIHLKTQDGHIQTEELYIRRGIFQGGSLSSLWFCLCLNPLSNALNNTNYGFNIRHQKVNQHRISHLLYMDDIKLYAATEVQLKELLKITEVCTSDVRMEFGMSKCKVLHIHKGQWKNLSEQEILTGETLDNMEKDETYKYLGFNQNIKIDHSEVKAQLTQEFRDRLITLLKTKLNSKNLTKAINTFAIPVLTYSFGIIKWSHTDIENINILIRTELTKHRMSHPKACKERLTIDRKHGDRGIIDIQSLHTRQIKTLGDFFQSKETNLHRSIVKADKNYTPLTLSRPDHPADAHNHKELQQEKINTWSQKALHGKHRYRVTEDHINERQSYTWLQDGQLFPETEGFMLAIQDQVIATRNYMKYIIKDTSITDDNCRKCHQQKETIDHITSACKTLAGTEYTARHNSAAKVIHQALATTNKLIENTDPYYNYTPTSVLENNEYKLYWDVEIHTDKTIPANRPDIVFQSKADKVTYLIDIAIPNDTNIQNAYAGKISKYTDLAIEIKRLWKQNKVTIVPLIMSVSGLTPNTFTPHLQQLGLDERLHKIFQKSVILKTCNIVRSFLNSDP

SEQ ID NO: 32223 - protein, 1208 aa, Callosobruchus maculatus
MDKVSFSNNQRRPRVRRLNSPEPQSQTQQPIAHNPTADVLPVQPATTKAGKPRQRLQWTTEMNKSVMHCYYTATRLETISTGYRHELYRLFTAEYPHLSTRVTEQRLIDQKRVITKNNRLTPQELQAIKSLVSNEINTVTPNDSLADESITEGQNNHTGGNQTPNTDTTNNTSIHLDVESEHEHIPDTPDQTSINLPSTATQSQNVKPPPCITQSTEQVMNTQYNKWCGTNPTLRDPLPRLIFRNNTRQILQTVNSNIIPQFLTKDSNLEDIHTVIYAAAATTLIVNGQKLPKRSKDHTSKRSKPKWQIKIENKISTIRKDLAHVTQYIHKNNLSKRIQTTISRLKSRSPQQTISEIYDTLKQKLAVYAARLRRYNESNDRKDTNNLFQKSERQFYQKITSNNQITTIEPPSRKELTDFWGSLWSEPKTHNENAPWIRQEEEKQQHIPEQGDVILTPQEIAETIKHTHNWKCPGVDNVQNFWYKQFSATYEMLTDQINKAILQPKRLPKFLTQGVTYIKPKNADTKNPANYRPITCLPTLYKIITATICKRIEQHLTQNNILTEEQKGCRKQSQGCKEQLIIDSVIMEQTRKEHRNLHTCFIDYKKAFDSVPHSWLTKTLQIYKINPTLRQFLTRIMETWRTNIHLKTQDGHIQTEELYIRRGIFQGDSLSSLWFCLCLNPLSNALNNTNYGFNIRHQKVNQPRISHLLYMDDIKLYAATEVQLKELLKITEVCTSDVRMEFGMSKCKVLHIHKGQWKNHSEQEILTGETLDNMEKDETYKYLGFNQNIKIDHSEVKAQLTQEFRDRLITLLKTKLNSKNLTKAINTFAIPVLTYSFGIVKWSHTDIENINILIRTELTKHRMSHPKACKERLTIDRKHGGRGIIDIQSLHTRQIKTLRDFFQSKETNLHRSIVKADKNYTPLTLSRPDHPADAHNHIELQQEKINTWSQKALHGKHRYRVTQDHINERQSYTWLQDGQLFPETEGFMLAIQDQVVATRNYMKYIIKDTSITDDNCRKCHQQKETIDHITSACKTLAGTEYTARHNSAAKVIHQALATTNKLIENTDPYYNYTPTSVLENNEYKLYWDVEIHIDKTIPANRPDIVFQSKADKVTYLIDIAIPNDTNIQNAYAGKISKYTDLAIEIKRLWKQNKVTIVPLIMSVSGLTPNTFTPHLQQLGLDERLQKIFQKSVILKTCNIVRSFLNSDP

SEQ ID NO: 32224 - protein, 1198 aa, Callosobruchus maculatus
MNKFVVRCYYTATKLETISTGYRHELHRLFIAQYPHLAERVTEQRLIDQKRVITKNNRLTPQELQAVKKLVANENTVHPIDSLVTESITETQNIHTRNNQTTNTATTNNISIQSEIDSEHEHTPNTPDITFTNLPATTTQSQQISQPPSVTQSAEAVNTAQPPSISGEPEQMTNSRTTQFNKRRNTTTQNQNQNIARSPSITQTAEQVMNTQFNKWCGTNPALRDPLPRLIFKNNTQQILHTINTNLIPQFITNNSNLEDIHTVIYAAAATTLIVNGQNLQKRSKDQRSNRAKPKWQIRIENKISTLRKDLAHLAQYSNNNNHPSKHIQRTINILKSKSPQKSIPEIADTFKQKLAVYAARLRRYNESNDRKDANSLFQKSEKQFYQKITSNNQITTIEPPSRQELTAFWRSLWSEPKTHNENAPWIRQEETKHQHITEQGNVILTTEEIAETIKHTHNWKCPGVDNVQNFWYKQFSSTYVMLTDQINKAILQPNRLPKFLTQGITYIKPKNADTKNPANYRPITCLPTLYKIITATICRRIEQHLMQNNILTEEQEGCRKHSQGCKEQLIIDSVIMEQTRKEHRNLHTCFIDYKKAFDSVPHSWLMKTLQIYKINPGLRQFLKSTMETWRTNIHLQTHDGHIQTDELHIRRGIFQGDSLSSLWFCLCLNPLSNTLNSTNHGFNIRHHKADQHKINHLLYMDDIKLYAATEVQLRELLKITEVYTSDIRMEFGMSKCKVLHINKGQWKNQPEKEVVTGQPLDNMDKDETYKYLGFNQNVKIDHTQVKAQLTQEFKDRLIKLLKTKLNSKNLTKAINTFAIPVLTYSFGIIKWSHTDIENIHILIRTELTKHRMSHPNACKERLAIDRKLGGRGIIDIQSLRTTQIQTLRHFFHTKQTNLHKAIVKADKNYTPLNLSSPDHVADTYNHIQSQQEKINTWSQKALHGKHRYRVTQDHINQKQSCAWLQDGQLFPETEGFMLAIQDQVIATRNYKKYIIEDPSITDDNCRKCQQQKETIDHITSGCKTLAGTEYTARHNSAAKVIHQALATTNKLIENTDPYYNYTPTSVLENDQYKLYWDVEIHTDKTIPANRPDIVFQSKADKITYLIDIAIPNDVNIQNTYAGKISKYTDLAMEIKRLWKQNKVTIVPLIMSVSGLTPSTFTQHLQQLGLDEKLHKVFQKSVILKTCNIVRSFLNSDQ

SEQ ID NO: 32225 - protein, 1208 aa, Callosobruchus maculatus
MDKVSFSNNQRRPRVRRLNSPEPQNQTQQPTAHNPTADVLPVQPATTKAGKPRQRLQWTTEMNKSVMHCYYTATKLETISTGYRHELYRLFTAQYPHLSTRVTEQRLIDQKRVITKNNRLTPQELQAIKSLVSDEINTVTPNDSSADESITERQNNHTRSNQTPNTDTTNNTSIHLDVDSEHEHTPDTPNQTSINLPSTATQSQNVTPPPCITQSTEQVMNTQYNKWCGTNPTLRDPLPRLIFKNNTRQILQTVNSNIIPQFLTKDSNLEDIHTVIYAAAATTLIVNGQKLPKRSKDHTSKRSKPKWQIRIENKISTIRKDLAHVTQYIHKNNLSKRIQTTINRLKSRSPQQTISEIYDTLKQKLAVYAARLRRYNESNDRKDTNNLFQKSERQFYQKITSNNQITTIEPPSRKELTDFWGSLWSEPKTHNENAPWIRQEEEKQQHIPEQGDVILTPQEIAETIKHTHNWKCPGVDNVQNFWYKQFSAIYEVLTDQINKAILQPNRLPKFLTQGVTYIKPKNADTKNPANYRPITCLPTLYKIITATIGKRIEQHLTQNNILTEEQKGCRKQSQGCKEQLIIDSVIMEQTRKEHRNLHTCFIDYKKAFDSVPHSWLTKTLQIYKINPTLRQFLTRTMETWRTNIHLKTQDGHIQTEELCIRRGIFQGDSLSSLWFCLCLNPLSNALNNTNYGFNIRHQKVNLHRISHLLYMDDIKLYAATEVQLKELLKITEVCTSDVGMEFGMSKCKVLHIHKGQWKNHSEQEILTGQTLDNMEKDETYKYLGFNQNIKIDHSEVKAQLTQEFRDRLITLLKTKLNSKNLTKAINTFAIPVLTYSFGIIKWSHTDIENINILIRTELTKHRMSHPKACKERLTIDRKHGGRGIIDIQSLHTRQIKTLRDFFQSKETNLHRSIVKADKNYTPLTLSRPDHPADAHNHIELQQEKINTWSQKALHGKHRYRVTQDHINERQSYTWLQDGQLFPETEGFMLAIQDQVIATRNYMKYIIKDTSITDDNCRKCHQQKETIDHITSACKTLAGTEYTARHNSAAKVIHQALATTNKLIDNTEPYYNYTPTSVLENNEYKLYWDVEIHTDKTIPANRPDIVFQSKADKVTYLIDIAIPNDTNIQNAYAGKISKYTDLAIEIKRLWKQNKVTIVPLIMSVSGLTPNTFTPHLQQLGLDERLHKIFQKSVILKTCNIVRSFLNSDP

SEQ ID NO: 32226 - protein, 1208 aa, Callosobruchus maculatus
MDKVSFSNNQRRPRVRRLNSPEPQNQTPQPIAHNPTADVLPVQPATTKAGKPRQRLQWTTEMNKSVMHCYYTATKLETISTGYRHELHRLFTAQYPHLSTRVTEQRLIDQKRVITKNNRLTPQELQAIKSLVSNEINTVPPNDSLADESTTERQNIHSRNSQTPNTDTTNDTSIHSDMDSEHEHIPDTPDQTSINLPLTATQSQKVTPPPSITQSTEQVMDTQYNKWCGTNPALRDPLPRLIFKKNTQQILHTINSNIIPQFLTNVSNLEDIHTVIYAAAATTLTVNGQKLPKRSKGHTSNRPKPKWQIRIENKISAIRKDLAHLAQYTNNDNRSKRIQTTIDILKSKSPQKSIPEIADTLKQKLAVYAARLRRYNESNERKNANNLFQKSEKQFYQKITANSQEATIEQPNRQDLTEFWSSLWSEPKTHNQDAPWIRQEEEKHQHIMEQGDVILTPEEIAETIKHTHNWKCPGVDNIQNFWYKQFSSTYEVLTDQINKAILQPKRLPKFLTQGITYIKPKNTDTKNPANYRPITCLPTLYKIITATICRRIEQHLTQNNILTEEQKGCRKQSQGCKEQLIIDSVIMEQTRKEHRNLHTCFIDYKKAFDSVPHSWLKKTLQIYKINSGLRQFLTRIMETWRTNIHLKTQHGHIQTDELHIRRGIFQGDSLSSLWFCLCLNPLSNALNNTNCGFNIRHEKVNQHKLNHLLYMDDIKLYAATEVQLRELLRITEVCTSDVRMEFGMSKCKVLHINKGQWKSNQERETLTGQTLDNMDKGETYKYLGFNQSVKIDHSQVKEQLIQEFRDRLIKLLKTKLNSRNLTKAINTFAIPVITYSFGIIKWSHTDVENIQILIRTELTRHRMSHPNACKERLTIDRKQGGRGIIDIQSLRTKQIKTLRHFFQSKQTNLHRAVVKADKNYTPLTLSSPNHAADTHNPIELQQEKINIWSQKALHGKHRYRITQDHINEKQSYAWLQDGQLFPETEGFMLAIQDQVIATRNYKKYIIKDPSVTNDNCRKCHQQKETIDHITSACKTLAGTEYTARHNSAAKIIHQALATTNKLIENTAPYYNYTPTSVLDNNQYKLYWDVEIHTDKTIPANRPDIVFQSKADKVTYLIDIAIPNDTNVQTAYAGKISKYTDLAIEVKRLWKQNKVVIVPLIMSVSGLTPNTFTPHLHQLGLDEKLHKIFQKSVILKTCNIVRSFLNSDQ

SEQ ID NO: 32227 - protein, 1207 aa, Callosobruchus maculatus
MDRVNFINNQRRPRVRRLNSPEPQTEKEQPIGDNPVADVLPVEPATTKAGKPRQRLQWTTEMNTSVMHCYYTATKLETISTGYRHELHRLFTAQYPHLSARVTEQRLIDQKRVITKNNRLTPQQLQAIKNLVADEINTVETNDSLVNESITETQHDHTLNDKTPNTNTTNTTSTHLEENPEHEFIPDAPDTVCTNRPPTTTRNQNVTQTPSFTQSAEQVMNAQFNKWCGTNPALRDPLPRLIFNSNTQKILHTINTNVIPQFLTSGSNLEDIHTVIYAAAAATLIVNGQKLPKRSNNHTSKRSKPKWQMRIENKITTIRKELAHLAQYTNNNNRSKRIQTTIDILKSKSPQKSIPEITDTLKQKLAVYAARLRRYNESNDRKDANNLFQKSEKQFYKKITTDNQITAIELPSKQELTEFWGSLWSEPKTHNENAPWIRQEEEKHQHIAEQGNVILTPEEIAETIKHTHNWKCPGVDNIQNFWYKQFSSVYEVLTDQINKAILQPNRLPKFLTQGITYIKPKNADTKNPANYRPITCLPTLYKIITATICRRIEKHLTENSILTEEQKGCRKQSQGCKEQLIIDSVIMEQTRKEHRNLHTCFIDYKKAFDSVPHSWLTKTLQIYKINPGLRQFLTRTMETWRTNIHLQTEDGHIQTDELHIRRGIFQGDSLSSLWFCLCLNPLSNTLNSTNCGFTIRHQKANQHKINHLLYMDDLKLYAATEVQLRELLRITEVCTSDIKMEFGMSKCKVLHINKGQWKNHPEQEVVTGQALDNMDKDETYKYLGINQNAKIDHTKIKSQLTQEFKDRLIRLLKTKLNSRNLTKAINTFAIPILTYSFGIIKWSHTDIENIHILIRTELTKHRMSHPKACKERLTIDRKQGGRGIIDIQSLHAKQIKSLRHFFHSKQTNLHKAIVKADKNYTPLALSCPDHAADAHNHIQAQQEKINTWSQKALHGKHRYRVTQDHINEKQSYTWLQDGQLFPETEGFMLAIQDQVIATRNYRKYIMKDPSISDDNCRKCHQQKETIEHITSGCKTLAGTEYTARHNSAAKVIHQALATTNKLIENTDPYYNYTPTSVLENNQFKLYWDIEIHTDKTIPANRPDIVFQSKTDKVTYLIDIAIPNDMNIQNTYAGKISKYTDLAIEIKRLWKQNKVVIVPLIMSVSGLTPNTFTPHLQQLGLDEKLHKTFQKSVILKTCSIVRSFLNSE

SEQ ID NO: 32228 - protein, 1236 aa, Callosobruchus maculatus
MHKVTSKNNQRRPRVRRLNSPEPQTQTEQPKDHNPAADVLPAQPATTKAGKPRQRLQWTTEINKHVMHCYYTATKLETISIGYRHELHRLFIAQYPHLAERVTEQRLIDQKRVITKNNRLTPEELQAIKILVSSEINTAHPNHPQTSNKTTIDNSSIHSETNPEHEHTQHIPDTAAQPSDSLATESITERHAIRTRNNRPPNTGTINNTSTHLELDLENDHTPDTPETTCTNLPSSATQSQNITVPPAITQSAEQVMNTQYNKWCGTNPTLRDPLPRLIFKNNTLQILHTINVNIIPQFLTKDSDLEVIHTVIYAAAATTLTLNGQKLPKRSIARTTERSKPKWQVRIENKISTIRKDLAHLAQYTNNNNRSKRVQTTINILKSKSPQQTIPVAVYVARLRRYNESNARKDANNRFQKSEKQFYQKITADNQITAIEPPSKQELTEFWGSLWSEPKTHNENAPWIIQEEEKHQHIVEQGDVILTPEEIAETIKHTHNWKCPGVDNVQNFWYKQFSATYEMLTDQINKAILQPNRLPKFLTQGMTYIKPKNADTKNPANYRPITCLPTLYKIITATICRRIEQHLTQNNILTEEQKGCRKQSQGCKEQLIIDNIIMEQTRKEHRNLHTCFIDYKKAFDSVPHSWLAKTLQIYEINPGLREFLTRTMETWRTSIHLKTQNGHIKTDELHIRRGIFQGDSLSSLWFCLCLNPLSNALNNTNCGFNIRHEKLNQHRINHLLYMDDIKLYAANEVQLRKLIRITETCSSDVRMEFGLSKCKVLHINKGQWKDHPQQETVAGQTLNNMNKDETYKYLGFNQNVKIDHTQVKAQLTQEFRDRLIKLLKTKLNSRNLTKAINTFAIPVLTYSFGIIKWSHTDIENIHILIRTELTKHRMSHPNACKERLTIDRKQGGRGITDIQSLRTRQIKTLRHFFQNKQTNLHRAIVKADKNYTPLNLSCSDHVADTHNPTQSQQEKISAWSQKPLHGKHRYRITQDHINEKQSYTWLQDGQLFPETEGFMLAIQDQVIATRNYKKYVIKDPSITDDNCRKCHQQKETIDHITSGCRTLAGTEYTARHNSAAKVIHQALATTNKLIENSDPYYNYTPTSVLENDQYKLYWDVEIHTHKTIPANRPDIVFQSKADKITYLIDIAIPNDVNIQNTYAGKISKYTDLAMEIKRLWKQNKVTIVPLIMSVSGLTPNTFTQNLQQLGLDEKLHKVFQKSVILKTCNIVRSFLNSDQ

SEQ ID NO: 32229 - protein, 1193 aa, Callosobruchus maculatus
MHKVTSKNNQRRPRVRRLNSPEPQAQTEQPIESNPAADVLPPQPATTKAGKPRQRLQWTTEINKSVMHCYYTATKLETISTGYRHELHRLFIAQYPHLAERVTEQRLIDQKRVIAKNNRLTPEELQAIKPFVSNEINTAHPNDPQTSNTNTTDNTSIHLEVDPEHEPTQDIPDTAVQPDDSLAIETITEGHAIHSRNNQPPNKDTTNNTSIHLEIDPGHDHTPETTCTNLPSTTTQNQNITIPAAITQSAEQVMSTQYNKWCGTNPVLRDPLPSLIFKNNTRQILRRINANIIPQLLTNDSDLEDIHTVIYAAAATTLIVNGQKLPKRSKNHTSKRSKPRWQIRIENKISTLRKDLAHLTQYTNNNNLSKRIQTTINRLKSKSPQQTIPEIADTLKQKLAVYAARLRRYNESNDRKDANNLFQKSEKQFYQKITSTTQITTIEPPTRQELTEFWGSLWSEPKTHNDNAPWIRQEEEKQQHIPEQGDVILTPQKIAETIKLTHNWKCPGVDNVQNFWYKQFTATYEALTNQTNKALLQPNRLPKFLTQGITYIKPKNADTKNLANYRPITCLPNLYKIITATIGKSIEQHLTQNNILTEEQKGCRKQSQGCKEQLIIDSVIMEQTRKEHRNLHACFIDYKKAFDSVPHSWLKETIEIYKINPGLRQFLTRTMETWRTNIYLQTEDGHIQTDELHIRRGIFQGDSLSSLWFCLCLNPLSNTLKDTNCGFTIRHQRVNLHKINHLLYMDDIKLYAATEVQLRELLRITEACTSDMRMEFGMSKCKVLHINKGQWKNHPQQEVVTGQTLDNMDKDETYKYLGFNQNVKIDHTQVKAQLAREFKDRLTRLLKTKLNSRNITKAINTFAIPVLTYSFGIINWSHTDIENIHILIRTEFTKHRMSHPNACKERLTIDRKQGGRGIIDIHSLRTKQIKTLRYFFHSKQTNLHKAIVKADKNYTPLALSCQDHAADTYNHIQSQQEKINTWSQRALHGKHRYRVTQDHINKKQSYTWLQDGQLFPETEGSMLAIQDQVIATRNYKKYIIKDPSITDDSCRKCHQQKETIEHITSGCKTLAGTEYTARHNSAAKVIHRALATTNKLTDNTDPYYNYTPTSVLENNKFKLYWDIEIHTDKTNPANRPDIVFQSKADKVTYLIDIAIPNDMNIQNTYTGKISKYTDLAIEIKGSGNKTKLLLSLS

SEQ ID NO: 32230 - protein, 1207 aa, Callosobruchus maculatus
MDKVSFSNNQRRPRVRRLNSPEPQSQTQQPIAHNPTADVLPVQPATTKAGKPRQRLQWTTEMNKSVMHCYYTATRLETISTGYRHELYRLFTAQYPHLSTRVTEQRLIDQKRVITKNNRLTPQELQAIKSLVSNEINTVTPNDSLADESITERQNNHTGSNQTPNTDTTNNTSIHLDVESEHEHIPDTPDQTSINLPSTATQSQNLTPPPCITQSIEQVMNTQYNKWCGTNPTLRDPLPRLIFKNNTRQILQTVNYNIIPQFLTKDSNLEDIHTVIYAAAATTLIVNGQKLPKRSKDHTSKRSKPKWQIRIENKISTIRKDLAHVSQYIHKNNLSKRIQTTISRLKSRSPQQTISEIYDTLKQKLAVYAARLRRYNESNDRKDTNNLFQKSERQFYQKITSNNQITIEPPSRKELTDFWGSLWSEPKIHNENAPWIRQEEEKQQHIPEQGDVILTPQEIAETIKHTHNWKCPGLDNVQNFWYKQFSATYEMLTDQINKAILQPNRLPKFLTQGVTYIKPKNADTKNPANYRPITCLPTLYKIITATIGKRIEQHLTQNNILTEEQKGCRKQSQGCKEQLIIDSVIMEQTRKEHRNLHTCFIDYKKAFDSVPHSWLTKTLQIYKINQTLRQFLTRIMETWRTNIHLKTQDGHIQTEELYIRRGIFQGDSLSSLWFCLCLNPLSNALNNTNYGFNIRHQKVNQHRISHLLYMDDIKLYAATEVQLKELLKITEVCTSDVRMEFGMSKCKVLHIHKGQWKNHSEQEILTGETLDNMEKDETYKYLGFNQNIKIDHSEVKAQLTQEFRDRLITLLKTKLNSKNLTKAINTFAIPVLTYSFGIIKWSHTDIENINILIRTELTKHRMSHPKACKERLTIDRKHGGRGIIDIQSLHTRQIKTLRDFFQSKDTNLHRSIVKADKNYTPLILSRPDHPADAHNHIELQQEKINTWSQKALHGKHRYRVTQDHINERQSYTWLQDGQLFPETEGFMLAIQDQVIATRNYMKYIIKDTSITDDNCRKCHQQKETIDHITSACKTLAGTEYTARHNSAAKVIHQALATTNKLIENTDPYYNYTPTSVLENNEYKLYWDVEIHTDKTIPANRPDIVFQSKADKVTYLIDIAIPNDTNIQNAYAGKISKYTDLAIEIKRLWKQNKVTIVPLIMSVSGLTPNTFTPHLHQLGLDERLHKIFQKSVILKTCNIVRSFLNSDP

SEQ ID NO: 32231 - protein, 1208 aa, Callosobruchus maculatus
MDKVSFSNNQRRPRVRRLNSPEPQNQTQQPTAHNPTADVLPVQPATTKAGKPRQRLQWTTEMNKSVMHCYYTATKLETISTGYRHELYRLFTAQYPHLSTRVTEQRLIDQKRVITKNNRLTPQELQAIKSLVSNEINTVTPNDSLADESITERQNNHTLSNQTPNTDTTNNTSIHLDVDSEHEHTPDTPNQTSINLPSTATQSQNVTPPPCITQSTEQVMNTQYNKWCGTNPTLRDPLPRLIFKNNTRQILQTVNSNIIPQFLTKDSNLEDIHTVIYAAAATTLIVNGQKLPKRSKDHTSKRSKPKWQIRIENKISTIRKDLAHVSQYINKNNLSKRIQTTINRLKSRSPQKTISEIYDTLKQKLAVYAARLRRYNESNDRKDTNNLFQKSERQFYQKITSNNQITTIEPPSRKELTDFWGSLWSEPKTHNENAPWIRQEEEKQQNIPEQGDVILTPQEIAETIKHTHNWKCPGVDNVQNFWYKQFSTTYEILTDQINKAILQPNRLPKFLTQGVTYIKPKNADTKNPANYRPITCLPTLYKIITATIGKRIEQHLTQNNILTEEQKGCRKQSQGCKEQLIIDSVIMEQTRKEHRNLHTCFIDYKKAFDSVPHSWLTKTLQIYKINPTLRQFLTRTMETWRTNIHLKTQDGHIQTEELCIRRGIFQGDSLSSLWFCLCLNPLSNALNNTNYGFNIRHQKVNQHRISHLLYMDDIKLYAATEVQLKELLKITEVCTSDVRMEFGMSKCKVLHIHKGQWKNHSEQEILTGQTLDNMEKDETYKYLGFNQNIKIDHSEVKAQLTQEFRDRLITLLKTKLNSKNLTKAINTFAIPVLTYSFGIIKWSHTDIENINILIRTELTKHRMSHPKACKERLTIDRKHGGRGIIDIQSLHTRQIKTLRDFFQSKETNLHRSIVKADKHYTPLTLSRPDHPADAHNHIELQQEKINTWSQKALHGKHRYRVTQDHINERQSYTWLQDGQLFPETEGFMLAIQDQVIATRNYMKYIIKDTSITDDNCRKCHQQKETIDHITSACKTLAGTEYTARHNSAAKVIHQALATTNKLIDNTDPYYNYTPTSVLENNEYKLYWDVEIHTDKTIPANRPDIVFQSKADRVTYLIDIAIPNDTNIQNAYAGKISKYTDLAIEIKRLWKQNKVTIVPLIMSVSGLTPNTFTPHLKQLGLDERLHKIFQKSVILKTCNIVRSFLNSDP

SEQ ID NO: 32232 - protein, 1241 aa, Callosobruchus maculatus
MHKVTSKNNQRRPRVRRLNSPEPQTHTEQPREHNPAADVLPAQPATTKAGKPRQRLQWTTEINKHVMHCYYTATKLETISTGYRHELHRLFIAQYPHLAERVTEQRLIDQKRVITKNNRLTPEELQAIKILVSNEINTTHPTHTQTSNKTTTDSTSIHSETYPEHEHTQHVPDTAVQPNDSLATELITERHAIRTRNNQPSDTGTTNNTSIHLELDLENDHTPDTPETTCTNLPSTTTQSQNVTIPPAITQSAEQVMNTQYNKWCGTNPTLRDPLPRLIFKNNTLQILHTINVNIIPQFLTKDSDLEDIHTVIYAAAATTLTLNGQKIPKRSIARTNERWQIRIENKISTIRKDLAHLAQYTNNNNRSKRIQTTINILKSKSPQQTISEIADTLKQKLAVYAARLRRYNESNARKDANNLFQKSEKQFYQKITADNQITAIEPPSKQELTEFWGSLWSEPKTHNENAPWIRQEEEKHQHIVEQGDVILTPEEIAETIKHTHNWKCPGVDNVQNFWYKQFSATYEMLTDQINKAILQPNRLPKFLTQGITYIKPKNAETKNPANYRPITCLPTLYKIITSTICRRIEQHLTQNNILTEEQKGCRKQSQGCKEQLIIDNVVMEQTRKEHRNLHTCFIDYKKAFDSVPHSWLAKTLQIYKINPGLREFLTRTMETWRTSIHLKTQNDHIKTDELHIRRGIFQGDSLSSLWFCLCLNPLSNTLNNTNCGFNIRHDKLNQHKINHLLYMDDIKLYAANEVQLRELIRITGACSSDVRMEFGLSKCKVLHINKGQWKDHPQQETVTGQTLNSMSKDETYKYLGFNQNVKIDHTQVKAQLTQQFRDRLIKLLKSKLNSRNLTKAINTFAIPVLTYSFGIIKWSHTDIENIHILIRTELTKHRMSHPNACKERLTIDRTQGGRGITDIQSLRTRQIKTLRHFFQNKQTNLHRAIVKADKNYTPLNLSCPDHVADTHNPAQSQQEKISTWSQKPLHGKHRYRVTQDHINKKQSYTWLQDGQLFPETEGFMLAIQDQVIATRNYKKYIIKDPSITDDNCGKCQQQKETIDHITSGCKTLAGTEYTARHNSAAKVIHQALATTNKLIENTDPYYNYTPTSVLENDQYKLYWDVEIHTDKTIPANRPDIVFQSKADKITYLIDIAIPNDVNIQNTYAGKISKYTDLAIEIKRLWKQNKVTIVPLIMSVSGLTPNTFTQHLQQLGLDEKLHKVFQKSVILKTCNIVRSFLNSDQ

SEQ ID NO: 32233 - protein, 906 aa, Callosobruchus maculatus
MSKPKWQIRIENKISTIRKDLAHLAQYTNNNRSKRIQATIDILESKSPQKSIPEIADTLKQKLAVYAARLRRYNESNERKNANNLFQKSEKQFYQKITANNQEATTDPPSRQELTEFWSSLWSELKTHNQDAPWIRQEEEKHQHIMEQGDVILTPEEIAETIKHTHNWKCPGVDNIQNFWYKQFSSTYEVLTDQINKAILQPNRLPKFLTQGITYIKPKNADIKNPANYRPITCLPTLYRIITATICRRIEQHLTQNNILTEEQKGCRKQSQGCKEQLIIDSVIMEQARKEHRNLHTCFIDYKKAFDSVPHSWLKKTLQIYKINPGLRQFLTRTMETWRTNIHLKTQHGHIQTDELHIRRGIFQGDSLSSLWFCLCLNPLSNALNNSNCGFNIRHAKVNQHKINHLLYMDDIKLYAATEIQLRELLRITEVCTSDVRMEFGMSKCKVLHINKGQWKSHQEREIVTGQTLDNMDKDETYKYLGFNQSVKIDHSQVKEQLIQEFRDRLIKLLKTKLNSRNLTKAINTFAIPVLTYSFGIIKWSHTDIENIQILIRTELTKHRMSHPNACKERLTIDRKQGGRGIIDIQSLRTKQIKTLRHFFRSKQTNLHRAIVKADKNYTPLTLSNPDHTADTHNPIESQQEKINTWSQKALHGKHRYRITQDHINEKQSYTWLQDGQLLPETEGFMLAIQDQVIATRNYKKYIIKDPSVTNDNCRKCQQQKETIDHITSACKTLAGTEYTARHNSAAKIIHQALATTNKLIENTDPYYNYTPTSVLDNNQYKLYWDVEIHTDKTITANRPDIVFQSKADKVTYLIDIAIPNDTNIQTTYAGKISKYTDLAKEVKRLWKQNKVVIVPLIMSVSGLTPNTFTPHLHQLGLDEKLHKIFQKSVILKTCSIVRSFLNSDQ

SEQ ID NO: 32234 - protein, 1208 aa, Callosobruchus maculatus
MDKVSFSNNQRRPRVRRLNSPEPQSQTQQPIAHNPTADVLPVQPATTKAGKPRQRLQWTTEMNKSVMHCYYTATRLETISTGYRHELYRLFTAQYPHLSTRVTEQRLIDQKRVITKNNRLTPQELQAIKSLVSNEINTVAPNDSLADESITERQNNHTGSNQTPNTDTTNNTSIHLDEESEHEHIPDTPDQTSINLTSTATQSQNVTPPPCITQSTEQVMNTQYNKWRGTNPTLRDPLPRLIFKNNTRQILQTVNSNIIPQFLTKDSNLEDIHTVIYAAAATTLIVNGQKLPKRSKDHTSKRSKPKWQIRIENKISTIRKDLAHVTQYIHKNNLSKRIQTTISRLKSRSPQQTISEIYDTLKQKLAVYAARLRRYNESNDRKDTNNLFQKSERQFYQKITSNNQITTIEPPSRKELTDFWGSLWSEPKTHNENAPWIRQEEEKQQHIPEQGDVILTPQEIEETIKHTHNWKCPGVDNVQNFWYKQFSATYEMLTDQINEAILQPNRLPKFLTQGVTYIKPKNADTKNPANYRPITCLPTLYKIITATIGKRIEQHLTQNNILTEEQKGCRKQSQGCKEQLIIDSVIMEQTRKEHRNLHTCFIDYKKAFDSVPHSWLTKTLQIYKINPTLRQFLTRIMETWRTNIHLKTQDGHIQTEELYIRRGIFQGDSLSSLWFCLCLNPLSNALNNTNYGFNIRHQKVNQHRISHLLYMDDIKLYAATEVQLKELLKITEVCTSDVRMEFGMSKCKVLHIHKGQWKNHSEQEILTGETLDNMEKDETYKYLGFNQNIKIDHSEVKAQLKQEFRDRLITLLKTKLNSKNLTKAINTFAIPVLTYSFGIIKWSHTDIENINILIRTELTKHRMSHPKACKERLTIDRKHGGRGIIDIQSLHTRQIKTLRDFFQSKETNLHRSIVKADKNYTPLTLSRPDHPADAHNHIELQQEKINTWSQKALHGKHRYRVTQDHINERQSYTWLQDGQLFPETEGFMLAIQDQVIATRNYMKYIIKDTSITDDNCRKCHQQKETIDHITSACKTLAGTEYTARHNSAAKVIHQALATTNKLIENTDPYYNYTPTSVLENNEYKLYWDVEIHTDKTIPANRPDIVFQSKADKVTYLIDIAIPNDTNIQNAYAGKISKYTDLAIEIKRLWKQNKVTIVPLIMSVSGLTPNTFTPHLQQLGLDKRLHKIFQKSVILKTCNIVRSFLNSDP

SEQ ID NO: 32235 - protein, 622 aa, Callosobruchus maculatus
MEQTRKEHRNLHTCFIDYKKAFDSVPHSWLTKILQIYKINPGLRQFLAKTMKTWRTNIHLTTQDGHIQTEELHIRRGIFQGDSLSSLWFCLCLNPLSNAMNNTNYGFTIRHQKVNLHRINHLLYMDDIKLYAASEVQLRELLKITEVCTLDVRMEFGMSKCKVLHINKGQWKNHSEQEIVTDQTLDNMGKDETYKYLGFNQNVKIDHTQVKAQLKQEFRDRLIRLLKTKLNSRNLTKAINTFAIPILTYSFGIIKWSHTDIENIHILMRTELTKHRMSHPNACKERLTVDRKQGGRGIIDIQSLHTRQIKTLRHFFQSKQTNLYGAIVKADKNYTPLNLSCPDHVSDTYNHIQSQQEKINTWSQKALHGKHRYRVTQDHINEKQSYTWLQDGQLFPETEGFMLAIQDQVIATRNYKKYIIKDPSITDDNCRKCQQQKETIDHITSRCKTLAGTEYTARHNSAAKVIHQALATTNKLIENTDPYYNYTPTSVLENDQYKLYWDVQIHTDKTIPSNRPDIVFQSKLDKVTYLIDIAVPNDVNIQNTYAGKISKYTDLAMEIKRLWKQDKVTIVPLIMSVSGLTPNTFTPHLQQLRLDEKLHKTFQKSVILKTCNIVRSFLNSDQ

SEQ ID NO: 32236 - protein, 717 aa, Callosobruchus maculatus
MLTDQINKAILQPNRFPKFLRQGITYIKPKNADTKNPANYRPITCLPTLYKIITATICRRIEQHLMQNNILTEEQKGCRKHSQGCKEQLIIDSVIMEQTRKEHRNLHTCFIDYKKAFDSVPHSWLMKTLQIYKINPGLRQFLKSTMETWRTNIHLQTHDGHIQTDELHIRRGIFQGDSLSSLWFCLCLNPLSNTLNSTNHGFNIRHHKADQHKINHLLYMDDIKLYAATEVQLRELLKITEVYTSDIRMEFGMSKCKVLHINKGQWKNQPEKEVVTGQPLDNMDKDETYKYLGFNQNVKIDHTQVKAQLTQEFKDRLIKLLKTKLNSKNLTKAINTFAIPVLTYSFGIIKWSHTDIENIHILIRTELTKHRMSHPNACKERLAIDRKLGGRGIIDIQSLRTTQIQTLRHFFHTKQTNLHKAIVKADKNYTPLNLSSPDHVADTYNHIQSQQEKINTWSQKALHGKHRYRVTQDHINQKQSYAWLQDGKLFPETEGFMLAIQDQVIATRNYKKYIIKDPSITDDNCRKCQQQKETIDHITSGCKTLAGTEYTARHNSAAKVIHQALATTNKLIENTDPYYNYTPTSVLENDQYKLYWDVEIHTDKTIPANRPDIVFQSKADKITYLIDIAIPNDVNIQNTYAGKISKYTDLAMEIKRLWKQNKVTIVPLIMSVSGLTPSTFTQHLQQLGLDEKLHKVFQKSVILKTCNIVRSFLNSDQ

SEQ ID NO: 32237 - protein, 989 aa, Callosobruchus maculatus
MDTQYNKWCGTNPALRDPLPRLIFKNNTQQVLHTINSNIIPQFLTNVSNLEDIHTVIYAAAATTLTVNGQKLPKRSKDHTSNRPKPKWQIRIENKISAIRKDLAHLAQYTINNNRSKRIQTTIDILKSKSPQKSIPEIADTLKQKLAVYAARLRRYNESNERKNANNLFQKSEKQFYQKITANNQEATIESPSRQDLTEFWSSLWSEPKTHNQDAPWIRQEEEKHQHIMEQGDVILTPEEIAETIKHTHNWKCPGVDNIQNFWYKQFSSTYEVLTDQINKAILQPNRLPKFLTQGITYIKPKNTDTKNPANYRPITCLPTLYKIITATICRRIEQHLTQNNILTEEQKGCRKQSQGCKEQLIIDSVIMEQTRKEHRNLHTCFIDYKKAFDSVPHSWLKKTLQIYKINSGLRQFLTRIMETWRTNIHLKTQHGHIQTDELHIRRGIFQGDSLSSLWFCLCLNPLSNALNNTNCGFNIRHEKVNQHKINHLLYMDDIKLYAATEVQLRELLRITEVCTSDVRMEFGMSKCKVLHINKGQWKSHQERETLTGQTVDNMDKGETYKYLGFNQSVKIDHSQVKEQLIQEFRDRLIKLLKTKLNSRNLTKAINTFAIPVITYSFGIIKWSHTDIENIQILIRTELTRHRMSHPNACKERLTIDRKQGGRGIIDIQSLRTKQIKTLRHFFHSKQTNLHRAIVKADKNYTPLTLSSPNHAADTHNPIELKQEKINTWSQKALHGKHRYRITQDHINEKQSYTWLQDGQLFPETEGFMLAIQNQVIATRNYKKYIIKDPSVTNDNCRKCHQQKETIDHITSACKTLAGTEYTARHNSAAKIIHQALATTNKLIENTAPYYNYTPTSVLDNNQYKLYWDVEIHTDKTIPANRPDIVFQSKADKVTYLIDIAIPNDTNVQTAYAGKISKYTDLAIEVKRLWKQNKVVIVPLIMSVSGLTPNTFTPHLHQLGLDEKLHKIFQKSVILKTCNIVRSFLNSDQ

SEQ ID NO: 32238 - protein, 1152 aa, Callosobruchus maculatus
MHKVTSKNNQRRPRVRRLNSPEPQTHTEQPREHNPAADVLPAQPATTKAGKPRQRLQWTTEINKHVMHCYYTATKLETISTGYRHELHRLFIAQYPHLAERVTEQRLIDQKRVITKNNRLTPEELQAIKILVSNEINTAHPNHTQTSNKTTIDSTSTHSETDPEHEHTQHVPDTAAQPNDSLATELTTERHAIRTRNNQPPDTGTTNNTSIHLELDVENDHIPDTPETTRTNLPATTTQSQNVTIPPAITQSAEQVMNTQYNKWCGTNPTLRDPLPRLIFKNNTLQILHTINVNIIPQFLTKDSDLEDIHTVIYAAAATTLTLNGQKIPKRSIARTTERSKPKWQIRIENKISTIRKDLAHLAQYTNNNNRSKRIQTTINILKSKSPQQTISEIADTLKQKLAVYAARLRRYNESNARKDANNLFQKSEKQFYQKISADNQITAIEPPSKQELTEFWGSLWSEPKTHNENAPWIRQEEEKHQHIVEQGDVILTPEEIAETIKHTHNWKCPGVDNVQNFWYKQFSATYEMLTDQINKAILQPNRLPKFLTQGITHIKPKNADTKNPANYRPITCLPTLYKIITATICRRIEQHLTQNNILTEEQKGCRKHSQGCKEQLIIDSVIMEQTRKEHRNLHTCFIDYKKAFDSVPHSWLAKTLQIYKINPGLRQFLTRTMETWRTNIHLKTQDGHIKTDELHIRRGIFQGDSLSSLWFCLCLNPLSNALKNTNCGFNIRHERLNQHKINHLLYMDDIKLYAANEVQLRKLIRITEVCSSDVRMEFGMSKCKVLHINKGQWKDHPEQETVTGQTLNNMNKDETYKYLGFNQNVKIDHTKVKAQLTQEFRDRLIKLLKTKLNSRNLTKAINTFAIPVLTYSFGIIKWSHTDIENIHILIRTELTKHRMSHPNACKERLTIDRKQGGRGIVDIQSLRTRQIKTLRHFFQNKQTNLHRAIVKADRNYTPLNLSCPDHAADTHNPTQSQQEKINTWSQKPLHGKHRYRITQDHINEKQSYTWLQDGQLFPETEGFMLAIQDQVIATRNYKKYIIKDPSITEDSCRKCHQQKETIDHITSGCKVLAGTEYTARHNSAAKVIHQALATANKLIENTDPYYNYTPTSVLENDRYKLYWDVEIHTDKTIPANRPDIVFQSKADKLPI

SEQ ID NO: 32239 - protein, 1247 aa, Callosobruchus maculatus
MDKVTFAKNQRRPRVRRLNSPEPQIQTPEQPIAPNPAADVLPVQPATTKAGKPRQRLQWTTEMNKSVMHCYYTATKLETISTGYRHEFHRLFTAQYPHLSTRVTEQRLIDQKRVIMKNNRLTPLELQTIKNLVADEINTVPPNDSLASESVAETQHIHTRNNQSPNTDTTDKTSKKNPVSNEINIVGSITETQNTQSPNNHTPDTTTFNKTNIHFETNPEHEQTPDIPNTTFTNSPSTTTQNRNINRPPSITQSAEEVMNIQFNKWCGTNPTLRDPLPRLIFKNNTQQILHSINANVIPQFITNDSTLEDIHTVIYAAAATTLILNGQKLPKRSTDHTSERSKPKWQIRIENKISAIRKDLAHLAQYTNNNNPSKRVQRTVNILKSKSPQQTVPEIADTLRQKLAVYAARLRRYNESNARKAANNLFQKSEKQFYQKITSDNQITTIEPPSKQELTEFWGSLWSEPKTHNEDAPWIKQEEQKHQHIEEQGDIILTPEEIAETIKHTHNWKCPGVDNIQNFWYKQFSATYEMLANQINKAIIQPERFPKFLTQGITYIKPKNADTKNPANYRPITCLPTLYKIVTSTICRRIEQHLTQNSILTEEQKGCRKQSQGCKEQLIIDSVIMEQTRKEHRSLHTCFIDYKKAFDSVPHSWLTKILQIYKINPGIRRFLTRTMETWRTNIHLKTQDGHIQTEELNIRRGIFQGDSLSSLWFCLCLNPLSNALNSTNYGFNIRHQKANQHRINHLLYMDDIKLYAATDVQLRELLRITEVCTSDVRMEFGMSKCKVLHINKGQWKNHPQQEIVTGQTLDNMDKEETYKYLGFNQSVKIDHTQTKAQLRQVFRDRLVKLLKTKLNSRNLTKAINTFAIPILPYSFGIIKWSHTDIENIHILIRTELTKHRMSHPNACKERLTIDRKQGGRGIIDIQSLHSRQIKTLRHFFQSKQTNLHRSIVKADKNYTPLNLSCPDHAADTYNHIQSQQEKINTWSQKALHGKHRYRVTQDHINERQSYTWLHDGQLFPETEGFMLAIQDQVIATQNYKKYIIKDPSITDDNCRKCHQQKETIDHITSGCKTLAGTEYTARHNSAAKVIHQALATTNKLIEDTDPYYNYTPTSVLENNQYKLYWDVEIHTDKTIPANRPDIVFQSKIDKVTYLIDIAIPNDVNIQNTYAGKISKYTDLAMEIKRLWKQDKVTIVPFIMSVSGLTPNTFTPHLQQLGLDERLHKTFQKSVILKTCNIVRSFLNSDQ

SEQ ID NO: 32240 - protein, 1207 aa, Callosobruchus maculatus
MDKVSFSNNQRRPRVRRLNSPEPQSQTQQPIAHNPTADVLPVQPATTKAGKPRQRLQWTTEMNKSVMHCYYTATRLETISTGYRHELYRLFTAQYPHLSTRVTEQRLIDQKRVITKNNRLTPQELQAIKSLVSNEINTVTPNDSLADESITERQNNHTGSNQTPNTDTTNNTSIHLDVESEHEHIPDTPDQTSINLPSTATQSQNVTPPPCITQSTEQVMNTQYNKWCGTNPTLRDPLPRLIFKNNTRQILQTVNSNIIPQFLTKDSNLEDIHTVIYAAAATTLIVNGQKLPKRSKNHTSKRSKPKWQIRIENKISTIRKDLAHVSQYIHKNNLSKRIQTTISRLKSRSPQQTISEIYDTLKQKLAVYAARLRRYNESNDRKDTNNLFQKSERQFYQKITSNNQITIEPPSRKELTDFWGSLWSEPKTHNENAPWIRQEEEKQQHIPEQGDVILTPQEIAETIKHTHNWKCPGVDNVQNFWYKQFSAIYEVLTDQINKAILQPNRLPKFLTQGVTYIKPKNADTKNPANYRPITCLPTLYKIITATIGKRIEQHLTQNNILTEEQKGCRKQSQGCKEQLIIDSVIMEQTRKEHRNLHTCFIDYKKAFDSVPHSWLTKTLQIYKINPTLRQFLTRIMETWRTNIHLKTQDGHIQTEELYIRRGIFQGDSLSSLWFCLCLNPLSNALNNTNYGFNIRHQKVNQHRISHLLYMDDMKLYAATEVQLKELLKITEVCTSDVRMEFGMSKCKVLHIHKGQWKNHSEQEILTGGTLDNMEKDETYKYLGFNQNIKIDHSEVKAQLTQEFRDRLITLLKTKLNSKNLTKAINTFAIPVLTYSFGIIKWSHTDIENINILIRTELTKDRMSHPKACKERLTIDRKHGGRGIIDIQSLHTRQIKTLRDFFQSKETNLHRSIVKADKNYTPLILSRPDHPADAHNHIELQQEKINTWSQKALHGKHRYRVTQDHINERQSYTWLQDGQLFPETEGFMLAIQDQVIATRNYMKYIIKDTSITDDNCRKCHQQKETIDHITSACKTLAGTEYTARHNSAAKVIHQALATTNKLIENTDPYYNYTPTSVLENNEYKLYWDFEIHTDKTIPANRPDIVFQSKADKVTYLIDIAIPNDTNIQNAYAGKISKYTDLAIEIKRLWKQNKVTIVPLIMSVSGLTPNTFTPHLQQLGLDERLQKIFQKSVILKTCNIVRSFLNSDP

SEQ ID NO: 32241 - protein, 989 aa, Callosobruchus maculatus
MNTQYNKWCGTNPTLRDPLPRLIFKNNTRQILQTVNSNIIPQFLTKDSNLEDIHTVIYAAAATTLIVNGQKLPKRSKDHTSKRSKPKWQIRIENKISTIRKELAHVTQYIHKNNLSKRIQTTINRLKSRSPQQTISEIYDTLKQKLAVCAARLRRYNESNDRKDTNNLFQKSERQFYQKITSNNQITTIEPPSRKELTDFWGSLWSEPKTHNEDAPWIRQEEEKQQHIPEQGDVILTLQEIAETIKHTHNWKCPGVDNVQNFWYKQFSATYEILTDQINKAILQPNTLPKFLTQGVTYIKPKNADTKNPANYRPITCLPTLYKIITATIAKRIEQHLTQNNILTEEQKGCRKQSQGCKEQLIIDSVIMEQTRKEHRNLHTCFMDYKKAFDSVPHSWLTKTLQIYKINPTLRQFLTRTMETWRTNIHLKTQDGHIQTEELCIRRGIFQGDSLSSLWFCLCLNPLSNALNNTNYGFNIRHQKVNQHRISHLLYMDDIKLYAATEVQLKELLKITEVCTSDVRMEFGMSKCKVLHIHKGQWKNHSEQEILTGQTLDNMEKDETYKYLGFNQNIKIDHSEVKAQLTQEFKDRLITLLKTKLNSKNLTKAINTFAIPVLTYSFGIIKWSHTDIENINILIRTELTKHRMSHPKACKERLTIDRKHGGRGIIDIQSLHTRQIKTLRDFFQSKETNLHRSIVKADKNYTPLTLSRPDHPADAHNHIELQQELINTWSQKALHGKHRYRVTQDHINEGQSYTWLQDGQLFPETEGFMLAIQDQVIATRNYMKYIIKDTSITDDNCRKCHQQKETIDHITSACKTLAGTEYTARHNSAAKVIHQALATTNKLIENTDPYYNYTPTSVLENNEYKLYWDVEIHTDKTIPANRPDIVFQSKADKVTYLIDIAIPNDTNIQNAYAGKISKYTDLAIEIKRLWKQNKVTIVPLIMSVSGLTPNTFSPHLQQLGLDNRLHKIFQKSVILKTCNIVRSFLNSDP

SEQ ID NO: 32242 - protein, 1260 aa, Callosobruchus maculatus
MDKVNLINNPRRPRVRRLNSPESQTRTQQPIAHNPAADVLPAQPATTKAGKPRQRLQWTTEMNKFVMRCYYTATKLETISTGYRHELHRLFIAQYPHLAERVTEQRLIDQKRVITKNNRLTPQELQAVKKLVANEINTVHPTDSLVTESITETQNIHTQNNQTTNTATTNNISIQSEIDSEHEHTPNTPDITFTNLPATTTQSQQISQPPSVTQSAETVNTAQPPSISGEPEQMTNPRTTQFNKRCNTTTQNQNQNIARSPSITQTAEQVMNIQFNKWCGTNPALRDPLPRLIFKNNTQQILHTINTNLIPQFITNNTNLEDIHTVIYAAAATTLIVNGQKLQKRSKDQRSNRAKPKWQIRIENKISTLRKDLAHLAQYSINNNHPSKHIQRTINIMKSKSPQKSIPEIADTLKQKLAVYAARLRRYNESNDRKDANNLFQKSEKQFYQKITSNNQITTIEPPSRQELTAFWRSLWSEPKTHNENAPWIRQEETKHQHITEQGNVILTTEEIAETIKHTHNWKCPGVDNVQNFWYKQFTSTYEMLTDQINKAILQPNRLPKFLTQGITYIKPKNADTKNPANYRPITCLPTLYKIITATICRRIEQHLMQNNILTEEQKGCRKHSQGCKEQLIIDSVIMEQTRKEHRNLHSCFIDYKKAFDSVTHSWLMKTLQIYKINPGLRQFLKSTMETWRTNIHLQTHDGHIQTDELHIRRGIFQGDSLSSLWFCLCLNPLSNTLNSTNHGFNIRHHKADQHKINHLLYMDDIKLYAATEVQLRELLKITEVYTSDIRMEFGMSKCKVLHINKGQWKNQPEKEVVTGQPLDNMDKDETYKYLGFNQNVKIDHTQVKAQLTQEFKDRLIKLLKTKLNSKNLTKAINTFAIPVLTYSFGIIKWSHTDIGNIHILIRTELTKHRMSHPNACKERLVIDRKLGGRGIIDIQSLRTTQIQTLRHFFHTKQTNLHKAIVKADKNYTPLNLSSPDHVADTYNHIQSQQEKINTWSQKALHGKHRYRVTQDHINQKQSYAWLQDGQLFPETEGFMLAIQDQVIATRNYKKYIIKDPSITDDNCRKCQQQKETIDHITSGCKTLAGTEYTARHNSGAKVIHQALATTNKLIENTDPYYNYTPTSVLENDQYKLYWDVEIHTDKTIPANRPDIVFQSKADKTTYLIDIAIPNDVNIRNTYAGKISKYTDLAMEIKRLWKQNKVTIVPLIMSVSGLTPSTFTQHLQQLGLDEKLHKVFQKSVILKTCNIVRSFLNSDQ

SEQ ID NO: 32243 - protein, 1245 aa, Callosobruchus maculatus
MHKVTSKNNQRRPRVRRLNSPEPQTHTEQPREHNPAADVLPAQPATTKAGKPRQRLQWTTEINKHVMHCYYTATRLETISTGYRHELHRLFIAQYPHLAERVTEQRLIDQKRVITKNNRLTPEELQAIKILVSNEINTAHPNHTQTSNKTTIDSTSIHSETDPEHEHTQHVPDTAVQPNDSLATELITERHPIRTRNNQPPDTGTTNNTSIHLELDLENDHTPDTPETTRTNLPTTTTQSQNVTIPPAITQSAEQVMNTQYNKWCGTNPTLRDPLPRLIFKNNTLQILHTINVNIIPQFLTKDSDLEDIHTVIYAAAATTLTLNGQKIPKRSIARTTERSKPKWQIRIENKISTIRKDLAHLAQYTNNNNRSKRIQTTINILKSKSPQQTISEIADTLKQKLAVYAARLRRYNESNARKDANNLFQKSEKQFYQKITADNQITAIEPPSKQELTEFWGSLWSEPKTHNENAPWIRQEEEKHQHIVEQGHVILTPEEIAETIKHTHNWKCPGVDNVQNFWYKQFSATYEMLTDQINKAILQPNRLPKFLTQGITYIKPKNADTKNPANYRPITCLPTLYKIITATICRRIEQHLTQNNILTEEQKGCRKHSQGCKEQLIIDSVIMEQTRKEHRNLHTCFIDYKKAFDSVPHSWLAKTLQIYKINPGLRQFLTRTMETWRTNIHLKTQDGHIKTDELHIRRGIFQGDSLSSLWFCLCLNPLSNALNNTNCGFNIRHERLNQHKINHLLYMDDIKLYAANEVQLKELIRITEVCSSDVRMEFGMSKCKVLHINKGQWKDHPEQETATGQTLNNMNKDETYKYLGFNQNVKIDHTKVKAQLTQEFRDRLIKLLKTKLNSRNLTKAINTFAIPVLTYSFGIIKWSHTDIENIHILIRTELTKHRMSHPNACKERLTIDRKQGGRGIVDIQSLRTRQIKTLRHFFQNKQTNLHRAIVKADRNYTPLNLSCPDHAADTHNPTQSQQEKINTWSQKPLHGKHRYRITQDHINEKQSYTWLQYGQLFPETEGFMLAIQDQVIATRNYKKYIIKDPSITEDSCRKCHQQKETIDHITSGCKVLAGTEYTARHNSAAKVIHQALATANKLIENTDPYYNYTPTSVLENDRYKLYWDVEIHTDKTIPANRPDIVFQSKDDKITYLIDIAIPSDVNVQNTYAGKISKYTDLAMEIKRLWKQNKVTIVPLIMSVSGLTPNTFTQHLQQLGLDEKLHKVFQKSVILKTCNIVRSFLNSDQ

SEQ ID NO: 32244 - protein, 1031 aa, Callosobruchus maculatus
MESEHEHIPDTPDQTSINLPSTATQSQNLTPPPCITQSTEQVMNTQYNKWCGTNPTLRDPLPRLIFKNDTRQILQTVNSNIIPQFLTKDSNLEDIHTVIYAAAATTLIVNGQKLPKRSKDHTSKRSKPKWQIRIENKISTIRKDLAHVTQYIHKNNLSKRIQTTISRLKSRSPQQTISEIYDTLKQKLAVYAARLRRYNESNDRKDTNNLFQKSERQFYQKITSNNQITTIEPPSRKELTDFWGSLWSEPKTHNENAPWIRQEEEKQQHIPEQGDVILTPQEIAETIKHTHNWKCQGVDNVQNFWYKQFSATYEMLTDQINKAILQPNRLPKFLTQGVTYIKPKNADTKNPANYRPITCLPTLYKIITATIGKRIEQHLTQNNILTEEQKGCRKQSQGCKEQLIIDSVIMEQTRKEHRNLHTCFIDYKKAFDSVPHSWLTKTLQIYKINPTLRQFLTRIMETWRTNIHLKTQDGHIQTEELYIRRGIFQGDSLSSLWFCLCLNPLSNALNNTNYGFNIRHQKVNQHRISHLLYMDDIKLYAATEVQLKELLKITEVCTSDVRMEFGMSKCKVLHIHKGQWKNHSEREILTGETLDNMEKDETYKYLGFNQNIKIDHSEVKAQLTQEFRDRLITLLKTKLNSKNLTKAINTFAIPVLTYSFGIIKWSHTDIENINILIRTELTKHRMSHPKACKERLTIDRKHGGRGIIDIQSLHTRQIKTLRDFFQSKETNLHRSIVKADKNYTPLTLSRPDHPADAHNHIELQQEKINTWSQKALHGKHRYRVTQEHINERQSYTWLQDGQLFPETEGFMLAIQDQVIATRNYMKYIIKDTSITDDNCRKCHQQKETIDHITSACKTLAGTEYTARHNSAAKVIHQALATTNKLIENTDPYYNYTPTSVLENNEYKLYWDVEIHTDKTIPANRPDIVFQSKADKVTYLIDIAIPNDTNIQNAYAGKISKYTDLAIEIKRLWKQNKVTIVPLIMSVSGLTPNTFTPHLQQLGLDERLHKIFQKSVILKTCNIVRSFLNSDP

SEQ ID NO: 32245 - protein, 990 aa, Callosobruchus maculatus
MSTQFNKWCGTNPALRDPLPRLIFKNNTQQILHTVNANVMPQFITDDSNLEDIHTVIYAAAATTLIVNGQKLSKRSKHQTSNRSKPKWQIRIDNKISTIRKDLAHLAQYTINNNHPSKHIQKTINILKSKSPQQTIPEITDTLKQKLAVYAARLRRYNESNARKDANSLFQKSEKQFYQKITADNQITTIEPPSKQELTQFWGSLWSEPKTHNEDAPWIREEEEKHQHIAEQGDVILSKEEVVETIKHTHDWKCPGVDNVQNFWYKHFSSTYEVLTNQINKAIRQPDRLPKFLTQGITYIKPKNADTKNPANYRPITCLPTLYKIITATLCRRIEQHLTQNNIFTEEQKGCRKQSQGCKEQLIIDSVIMEQSRKEHRNLHTCFIDYKKAFDSVPHSWLTKILQIYKINPGLRQFLAKTMKTWRTNIHLTTQDGHIQTEELHIRRGIFQGDSLSSLWFCLCLNPLSNALKNTNYGFNIRHQKVNQHRINHLLYMDDIKLYAATEVQLRELLKITEVCTLDVRMEFGMSKCKVLHINKGQWKNHSEQEIVTDQTLDNMGKDETYKYLGFNQNVKIDHTQVKAQLKQEFRDRLIRLLKTKLNSRNLTKAIKTFAIPILTYSFGIIKWSHTDIENIHILMRTELTKHRMSHPNACKERLTVDRKQGGRGIIDIQSLHTSQIKTLRHFFQSKQTNLHGAIVKADKNYTPLNLSSPDHVADTHNHNQSQQEKINTWSQKALHGKHRYRVTQDHINEKQSYTWLQDGQLFPETEGFMLAIQDQVIATRNYKKYVIKDPSITDDNCRKCHQQRETIDHITSGCKTLAGTEYTARHNSAAKVIHQALATTNKLIENTDPYYNYTPISVLENDRYKLYWDVEIHTDKTIPANRPDIVFQSKADNITYLIDIAIPNDVNIQNTYAGKISKYTDLAMEIKRLWKQNKVTIVPLIMSVSGLTPNTFTQHLQQLGLDEKLHKTFQKSVILKTCNIVRSFLNSDQ

SEQ ID NO: 32246 - protein, 981 aa, Callosobruchus maculatus
MVWHQSYIARSPAQTNFKNNTLQILHTINVNIIPQFLTKDSDLEDIHTVIYAAAATALTLNGQRLPKRSIARTTERSKPKWQIRIENKISTIRKDLAHLAQYTNNNNRSKRVQTTINILKSKSPQQTIPEIADTLKQKLAVYAARLRRYNESNARKDANNLFQKSEKQFYQKITSDNQITTIELPSKQELTEFWGSLWSEPKTHNENAPWIRQEEEKHQQIAEQGDVILTPEEIAETIKHTHNWKCPGVDNIQNFWYKQFSSVYEVLTDQINKAILQPNRLPKFLTQGITYIKPKNADTKNPANYRPITCLPTLYKIITATICRRIEKHLTENNILTEEQKGCRKQSQGCKEQLIIDSVIMEQTRKEHRNLHTCFIDYKKAFDSVPHSWLTKTLQIYKINPGLRQFLTRTMETWRTNIHLQTEDGHIQTDELHIRRGIFQGDSLSSLWFCLCLNPLSNTLNSTNCGFTIRHQKANQHKINHLLYMDDLKLYAATEVQLRELLRITEVCTSDIKMEFGMSKCKVLHINKGQWKNHPEQEVVTGQALDNMDKDETYKYLGINQNAKIDHTKIKSQLTQEFKDRLIRLLKTKLNSKNLTKAINTFAIPILTYSFGIIKWSHTDIENIHILIRTELTKHRMSHPKACKERLTIDRKQGGRGIIDIQSLHAKQIKSLRHFFHSKQTNLHKAIVKADKNYTPLALSCPDHAADAHNHIQAQQEKINTWSQKALHGKHRYRVTQDHINEKQSYTWLQDGQLFPETEGFMLAIQDQVIATRNYRKCIMKDPSISDDNCRKCHQQKETIEHITSGCKTLAGTEYTARHNSAAKVIHQALATTNKLIENTDPYYNYTPTSVLENNQFKLYWDIDIHTDKTIPANRPDIVFQSKTDKVTYLIDIAIPNDMNIQNTYAGKISKYTDLAIEIKRLWKQNKVVIVPLIMSVSGLTPNTFTPHLQQLGLDEKLHKTFQKSVILKTCSIVRSFLNSE

SEQ ID NO: 32247 - protein, 1199 aa, Callosobruchus maculatus
MNKSVMRCYYTATKLETIATGYRHELHRLFIAQYPHLAERVTEQRLIDQKRVITKNNRLTPQELQAIKKLVANEIKTVHPNDSLATESITETQNTHTRNNQTTNTATTNNISTQSEIDSKHEHTSNTPDITLINLHAMTTQSQQISQPPSVTQPTEAANTAQQSSISGEPEQMTNSRTTQSNKRCNTTTQSQNQNIARSPSITQTAEQVMNTQFNKWCGTNPALRDPLPRLIFKNNTQQILHTININLIPKFITNNSNLEDIHTVIYAAAATTLIVNGQKLQKRFKDQRSNRPKPKWQIRIENKISTLRKDLAHLAQYSNNNNHPSKHIQRTINILKSKSPQKTIPEIADTLKQKLAVYAARLRRYNESNDRKDANNLFQKSEKQFYQKITSNNQITAIEPPSRKELTAFWRSLWSEPKTHNENAPWIRQEETKHQHITEQGNVILTTEEIAETIKHTHNWKCPGVDNVQNFWYKQFSSTYEMLTDQINKAILQPNRLPKFLTQGITYIKPKNSDTKNPANYRPITCLPTLYKIITATICRRIEQHLMQNNILAEEQKGCRKHSQGCKEQLIIDSVIMEQTRKEHRNLHTCFIDYKKAFDSVPHSWLMKTLQIYKINPGLRQFLKSTMESWRTNIHLQTHDGHIQTDELHIRRGIFQGDSLSSLWFCLCLNPLSNTLNSTNHGFNIRHHKADQHKINHLLYMDDIKLYAATEVQLRELLKLTEVYTSDIRMEFGMSKCKVLHINKGQWKNQPEKEVVTGQPLDNMDKDETYKYLGFNQNVKIDHTQVKAQLTQEFKNRLIKLLKTKLNSKNLTKAINTFAIPVLTYSFGIIKWSHTDIENIHILIRTELTKHRMSHPNTCKERLTIDRKLGGRGFIDIQSLRTTQIQTLRHFFHTKQTNLHKAIIKADKNYTPLNLSSPDHVADRYNHIQSRQEKINTWSQKALHGKHRYRVTQDHINQKQSYTWLQDGQLFPETEGFMLAIQDQVIATRNYKKYIIKDPSIIDDNCRKCQQQKETVDDITSGCKTLAGTEYTARHNSAAKVIHQALATTNKLIENTDPYYNYTPTSVLENDQYKLYWDVEIHTDKTIPANRPDIVFQSKADKITYLIDIAIPNDVNIQNTYAGKISKYTDLAMEIKRLWKQNKVTIVPLIMSVSGLTPNTFTQHLQQLGLDEKLHKVFQKSVILKTCNIVRSFLNSDQ

SEQ ID NO: 32248 - protein, 1148 aa, Callosobruchus maculatus
MNKSVMRCYYTATKLETISTGYRHELHRLFTTQYPHLSTRVTEQRLIDQKRVITKNNRLTPQELQDIKNLVSNEMNIVQPSDSLTTEQIVETQNSDTQTSQTSNTAKTNNTSIHSELGPEHDQALDTPDTTITNLPSTIIQIQNITRPFAVTQSVEQVMSTQYNKWCGTNPALRDPLPRLIFKNNTQQILPTVNANVIPQFIRDDTNLEDIHTVIYAAAATTLIVNGQKLSKRSKHQTSNRTKPKWQIRIENKISTIRKDLAHLAQYTINNNHPSRHIQRTINILKSKSPQQTIPEITDTLKQKLAVYAARLRRYHESNARKDANSLFQKSEKQFYQKITADNQITTIEPPSKQELTEFWGSLWSEPKTHNEDAPWIREEEEKHQHIAEQGDIILSKEEIVETIKHTHDWKCPGVDNVQNFWYKHFSSTYEVLTNQINKAIRQPDRLPKFLTQGITYIKPKNADTKNPANYRPITCLPTLYKIITATLCRRIEQHLTQNNILTEEQKGCRKQSQGCKEQLIIDSVIMEQTRKEHRNLHTCFIDYKKAFDSVPHSWLTKILQIYKINPGLRQFLAKTMKTWRTNIHLTTQDGHIQTEELHIRRGIFQGDSLSSLWFCLCLNPLSNALNNTNYGFNIRHQKVNQHRINHLLYMDDIKLYAATDVQLRELLRITEVYTSDVRMEFGMNKCKVLHINKGQWKNHPEQEIVTGQTLDNMDKEETYKYLGFNQSVKIDHTQIKAELRQVFRDRLIKLLKTKLNSRNLTKAINTFAIPILTYSFGIIKWSHTDIENIHILIRTELTKHRMSHPNACKERLTIDRTQGGRGITDIQSLRTRQIKTLRHFFQNKQTNLHRAIVKADKNYTALNLSCPDHVADTHNPTQSQQEKISTWSQKPLHGKHRYRVTQDHINKKQSYTWLQDGQLFPETEGFILAIQDQVIATRNYKKYIMKDPSITDDNCRKCQQQKETIDHITSGCKTLAGTEYTARHNSAAKVIHQALATTNKLIENTDPYYNYTPTSVLENDQYKLYWDVQIHTDKTIPANRPDIVFRSKLDKVTYLIDIAIPNDVNIQNTYAGKISKYTDLAMEIKRLWKQDKVTIVPLIMSVSGLTPNTFTPHLQQLGLDEKLHKTFQKSVILKTCNIVRSFLNSDQ

SEQ ID NO: 32249 - protein, 989 aa, Callosobruchus maculatus
MNTQYSKWCGTNPVLRDPLPRLIFKNNTRQILHTINANIIPQFLTNDSDLEDIHTVIYAAAATTLIVNGQKLPKRSKNHTGKRYKPKWQIRIENKISTLRKDLAHVTQYTNNNNLSKRIQTTINRLKSKSPQQTIPEIADTLKQKLAVYAARLRRYNESNDRKDANNLFQKSEKQFYQKMTSNNQITTTEPPSRQELTEFWGSLWSEPKTHNENAPWIRQEEEKHQHIAEQGDVVFTPDEIAETIKHTHNWKCPGVDNVQNFWYKQFSATYEMLTEQINKAILQPNRLPKFLTQGITYIKPKNGDTRNPANYRPITCLPTLYKIITATIGKRIEQHLTQNNILTEEQKGCRKQSQGCKEQLIIDSVIMEQTRKEHRNLHTCFIDYKKAFDSVPHSWLTKTLQIYKINPVLRQFLTRTMETWRTNIHLKTQDGHIQTEELLIRRGIFQGDSLSSLWFCLCLNPLSNALNNTNYGFNIRHQKVNQHRINHLLYMDDIKLYAATEVQLKELLRITEVCTSDVRMEFGMSKCKVLHINKGQWKNQSEQEILTGETLDNMDKDETYKYLGFNQNIKIDHTQAKAQLTQEFRNRLLKLLKSKLNSKNLTKAINTFAIPVLTYSFGIIKWSHTDIENIHILIRTELTKHRMSHPNACKERLTIDRKQGGRGIIDIQSLHTRQIKTLRDFFQSKQTNLHRSIVKADKNYTPLNLSRSDHSADGHNHIELQQEKINTWSQKALHGKHRYRVTQEHINERQSYTWLQDGQLFPETEGFMLAIQDQVIATRNYMKYIIKDTSITDDNCRKCHQQKETIDHITSGCKTLAGTEYTARHNSAAKVIHQALATTNKLIENTDPYYNYTPTSVLEDNEYKLYWDVEIHTDKTIPANRPDIVFQSKADKVTYLIDIAIPNDTNIQNAYAGKISKYTDLAIEIKRLWKQNKVTIVPLIMSVSGLTPNTFTPHLQQLGLDEKLHKIFQKSVILKTCNIVRSFLNSDP

SEQ ID NO: 32250 - protein, 989 aa, Callosobruchus maculatus
MNTQYNKWCGTNPTLRDPLPRLIFRNNTRQILQTVNSNIIPQFLTKDSNLEDIHTVIYAAAATTLIVNGQKLPKRSKDHTSKRSKPKWQIRIENKISTIRKDIAHVTQYIHKNNLSKRIQTTISRLKSRSPQQTISEIYDTLKQKLAVYAARLRRYNESNDRKDTSNLFQKSERQFYQKITSNNQITTIDPPSRKELTDFWGSLWSEPKTHNENAPWTRQEEEKQQHIPEQGDVILTPQEIAETIKHTHNWKCPGVDNVQNFWYKQFSATYEMLTDQINKAILQPNRLPKFLTQGVTYIKPKNADTKNPANYRPITCLPTLYKIITATIGKRIEQHLTQNIILTEEQKGCRKQSQGCKEQLIIDSVIMEQTRKEHRNLHTCFIDYKKAFDSVPHSWLTKTLQIYKINPTLRRFLTRIMETWRTNIHLKTQDGHIQTEELYIRRGIFQGDSLSSLWFCLCLNPLSNALNNTNYGFNIRHQKVNQHRISHLLYMDDIKLYAATEVQLKELLKITEVCTSDVRMEFGMSKCKVLHIHKGQWKNHSEQEILTGETLDNMEKDETYKYLGFNQNIKIDHSEVKAQLTQEFRDRLITLLKTKLNSKNLTKAINTFAIPVLTYSFGIIKWSHTDIENINILIRTELTKHRMSHPKACKERLTIDRRHGGRGIIDIQSLHTRQIKTLRDFFQSKETNLHRSIVKADKNYTPLTLSRPDHPADAHNHIELQQEKINTWSQKALHGKHRYRVTQDHINERQSYTWLQDGQLFPETEGFMLAIQDQVIATRNYMKYIIKDTSITDDNCRKCHQQKETIDHITSACKTLAGTEYTARHNSAAKVIHQALATTNKLIENADPYYNYTPTSVLENNEYKLYWDVEIHTDKTIPANRPDIVFQSKADKVTYLIDIAIPNDTNIQNAYAGKISKYTDLAIEIKRLWKQNKVTIVPLIMSVSGLTPNTFTPHLQQLGLDERLQKIFQKSVILKTCNIVRSFLNSDP

SEQ ID NO: 32251 - protein, 1260 aa, Callosobruchus maculatus
MDKVNLINNPRRPRVRRLNSPESQTRTQQPIAHNPAADVLPAQPATTKAGKPRQRLQWTTEMNKFVMRCYYTATKLETISTGYRHELHRLFIAQYPHLAERVTEQRLIDQKRVITKNNRLTPQELQAVKTLVANEINTVHPIDSLVTESITETQNIHTRNNQTTNTATTNNISIQSEIDSEHEHTPNTPDITFTNLPATTTQSQQISQPPSVTQSAEAVNTAQPPSISGEPEQMTNSRTTQFNKRCNTTTQNQNQNIARSPSITQTAEQVMNTQFNKWCGTNPALRDPLPRLIFKNNTQQILHTINTNLIPQFITNNSNLEDIHTVIYAAAATTLIVNGQKLQKRSKDRRSNRAKPKWQIRIENKISTLRKDLAHLAQYSNNNNHPSKHIQRTINILKSKSPQKSIPEIADTLKQKLAVYAARLRRYNESNDRKDANNLFQKSEKQFYQKITSNNQITTIEPPSRQELTAFWRSLWSEPKTHNENAPWIRQEETKHQHITEQGNVILTTEEIAETIKHTHNWKCPGVDNVQNFWYKQFSSTYEMLTDQINKAILQPNRLPKFLTQGITYIKPKNADTKNPANYRPITCLPTLYKIITATICRRIEQHLMQNNILTEEQKGCRKLSQGCKEQLIIDSVIMEQTRKEHRNLHTCFIDYKKAFDSVPHSWLMKTLQIYKINPGLRQFLKSTMETWRTNIHLQTHDGHIQTDELHIRRGIFQGDSLSSLWFCLCLNPLSNTLNSTNHGFNIRHHKADQHKINHLLYMDDIKLYAATEVQLRELLKITEVYTSDIRMEFGMSKCKVLHINKGQWKNQPEKEVVTGQPLDNMDKDETYKYLGFNQNVKIDHTQVKAQLTQEFKDRLIKLLKTKLNSKNLTKAINTFAIPVLTYSFGIIKWSHTDIENIHILIRTELTKHRMSHPNACKEWLAIDRKLGGRGIIDIQSLRTTQIQTLRHFFHTKQTNLHKAIVKADKNYTPLNLSSPDHVADTYNHIQSQQEKINTWSQKALHGKHRYRVTQDHINQKQSYAWLQDGQLFPETEGFMLAIQDQVIATRNYKKYIIKDPSITDDNCRKCQQQKETIDHITSGCKTLAGTEYTARHNSAAKVIHQALATTNKLIENTDPYYNYTPTSVLENDQYKLYWDVEIHTDKTIPANRPDIVFQSKADKITYLIDIAIPNDVNIQNTYAGKISKYTDLAMEIKRLWKQNKVTIVPLIMSVSGLTPSTFTQHLQQLGLDEKLHKVFQKSVILKTCNIVRSFLNSDQ

SEQ ID NO: 32252 - protein, 1209 aa, Callosobruchus maculatus
MDRVNFMNIQRRPRVRRLNSPEPQTQTEQPIEHNPAADVLPTQPATTKAGKPRQRLQWTTEMNKSVMRCYYTATKLETISTGYRHELHRLFTTQYPHLSTRVTEQRLIDQKRVITKNNRLTPQELQDIKNLVSNEMNTVQPNDSLTTEQIVETQNSDTQTSQTSNTAKTNNTSIHSELGPEHDQALDTPDTTITNLPSTIIQIQNITRPFAVTQSVEQVMSTQYNKWCGTNPALRDHLPRLIFKNNTQQILHTVNANVIPQFIRDDSNLEDIHTVIYAAAATTLIVNGQKLSKRSKHQTSNRTKPKWQIRIENKISTIRKDLAHLAQYTINNNYPSRHIQRTINILKSKSPQQTIPEITDTLKQKLAVYAARLRRYNESNARKDANSLFQKSEKQFYQKITADNKITTIEPPSKQELTEFWGSLWSEPKTHNEDAPWIREEEEKHQHIAEQGDVILSKEEIVETIKHTHDWKCPGVDNVQNFWYKHFSSTYEVLTNQINKAIRQPDRLPKFLTQGITYIKPKNADTKNPANYRPITCLPTLYKIITATLCRRIEQHLTQNNILTEEQKGCRKQSQGCKEQLIIDSVIMEQTRKEHRNLHTCFIDYKKAFDSVPHSWLTKILQIYKINPGLRQFLAKTMKTWRTNIHLTTQDGHIQTEELHIRRGIFQGDSLSSLWFCLCLNPLSNALNNTNYGFNIRHQKVNQHRINHLLYMDDIKLYAATDVQLRELLRITEVYTSDVRMEFGMNKCKVLHINKGQWKNHPEQEIVTGQTLDNMDKEETYKYLGFNQSVKIDHTQIKAELRQVFRDRLIKLLKTKLNSRNLTKAINTFAIPILTYSFGIIKWSHTDIENIHILIRTELTKHRMSHPNACKERLTIDRTQGGRGITDIQSLRTRQIKTLRHFFQNKQTNLHRAIVKADKNYTPLNLSCPDHVADTHNPTQSQQEKISTWSQKPLHGKHRYRVTQDHINKKQSYTWLQDGQLFPETEGFMLAIQDQVIATRNYKKYIIKDPSITDDNCRKCQQQKETIDHITSGCKTLAGTEYTARHNSAAKVIHQALATTNKLIENTDPYYNYTPTSVLENDQYKLYWDVQIHTDKTIPANRPDIVFQSKLDKVTYLIDIAIPNDVNIQNTYAGKISKYTDLAMEIKRLWKQDKVTIVPFIMSVSGLTANTFTPHLQQLGLDEKLHKTFQKSVILKTCNIVRSFLNSDQ

SEQ ID NO: 32253 - protein, 1260 aa, Callosobruchus maculatus
MDKVNLINNLRRPRVRRLNSPECQTQTQQPIAHNPAADVLPTQPATTKAGKPRQRLQWTTEMNKSVMRCYYTATKLETIATGYRHELHRLFIAQYPHLAERVTEQRLIDQKRVIIKNNRLTPQELQAIKELVANEIKTVHPNDSLDTESITETQNTHTRDNQTTNTATTNNISTQSEIDSEHEHKPNTPDITLTNLPATTKQSQQISQPPSVTQPTEAANTAQQPFISGGPEQMTNSRTTQSNKRCNTTTQSQNQNIARSPSITQTAEQVMNTQFNKWCGTNPALRDPLPRLIFKNNTQQILHTINTNLIPQFITNNSNLEDIHTVIYAAAATTLIVNGQKLQKRSKDQRSNRPKPKWQIRIENKISTLRKDLAHLAQYSNNNNHPSKHIQRTINILKSKSPQKTIPEIADTLKQKLAVYAARLRRYNESNDRKDANNLFQKSEKQFYQKIISNYQITTIEPPSRKELTAFWRSLWSEPKTHNENAPWIRQEETKHQHITEQGNVILTTEEIAETIKHTHNWKCPGVDNVQKFWYKQFSSTYEMLTDQINKAILQPNRLPKFLTQGITYIKPKNSDTKNPANYRPITCLPTLYKIITATICRRIEQHLMQNNILAEEQKGCRKHSQGCKEQLIIDSVIMEQTRKEHRNLHTCFIDYKKAFDSVPHSWLMKTLQIYKINPGLRQFLKSTMETWRTNIHLQTHDGHIQTDELHIRRGIFQGDSLSSLWFCLCLNPLSNTLNSTNHGFNIRHHKADQHKINHLLYMDDIKLYAATEVQLRELLKITEVYTSDIRMEFGMSKCKVLHINKGQWKNQPEKEVVTGQPLDNMDKNETYKYLGFNQNVKIGHTQVKAQLTQEFKDRLIKLLKTKLNSKNLTKAINTFAIPVLTYSFGIIKWSHTDIENIHILIRTELTKHRMSHPNTCKERLTIDRKLGGRGFIDIQSLRTTQIQTLRRFFHTKQTNLHKAIVKADKNYTPLNLSSTDHVADKYNHIQSQQEKINTWSQKALHGKHRYRVTQDHINQKQSYTWLQDGQLFPETEGFMLAIQDQVIATRNYKKYIIKDPSITDDNCRKCQQQKETVDHITSGCKTLAGTEYTARHNSAAKVIHQALATTNKLIENTDPYYNYTPTSVLENDQYKLYWDVEIHTDKTIPANRPDIVFQSKADKITYLIDIAIPNDVNIQNTYAGKISKYTDLAMEIKRLWKQNKVTIVPLIMSVSGLTPNTFTQHLQQLGLDEKLHKVFQKSVILKTCNIVRSFLNSDQ

SEQ ID NO: 32254 - protein, 1209 aa, Callosobruchus maculatus
MDRVNFMNNQRRPRVRRLNSPEPQTQTEQPIEHNPAADVLPTQPATTKAGKPRQRLQWTTEMNKSVMRCYYTATKLETISTGYRHELHRLFTTQYPHLSTRVTEQRLIDQKRVITKNNRLTPQELQDIKNLVSNEMNIVQPNDSLTTEQIVETQNSDTQTSQTSNTAKTNNTSIHSELGPEHDQALDTPDTTITNLPSTIIQIQNITRPFAVTQSVEQVMSTQYNKWCGTNPALRDPLPRLIFKNNTQQILHTVNANVIPQFIRDDSNLEDIHTVIYAAAATTLIVNGQKLSKRSKHQTSNRTKPKWQIRIENKISTIRKDLAHLAQYTINNNHPSRHIQRTINILKSKSPQQTIPEITDTLKQKLAVYAARLRRYNESNARKDANSLFQKSEKQFYQKITADNQITTIEPPSKQELTEFWGSLWSEPKTHNEDAPWIREEEEKHQHIAEQGDVILSKEEIVETIKHTHDWKCPGVDNVQNFWYKHFSSTYEVLTNQINKAIRQPDRLPKFLTQGITYIKPKNADTKNPANYRPITCLPTLYKIITATLCRRIEQHLTQNNILTEEQKGCRKQSQGCKEQLIIDSVIMEQTRKEHRNLHTCFIDYKKAFDSVPHSWLTKILQIYKINPGLRQFLAKTMKTWRTNIHLTTQDGHIQTEELHIRRGIFQGDSLSSLWFCLCLNPLSNALNNTNYGFNIRHQKVNQHRINHLLYMDDIKLYAATDVQLRELLRITEVYTSDVRMEFGMNKCKVLHINKGQWKNHPEQEIVTGQTLDNMDKEETYKYLGFNQSVKIDHTQIKAELRQVFRDRLIKLLKTKLNSRNLTKAINTFAIPILTYSFGIIKWSHTDIENIHILIRTELTKHRMSHPNACKERLTIDRTQGGRGITDIQSLRTRQIKTLRHFFQNKQTNLHRAIVKADKNYTPLNLSCPDHVADTHNPTQSQQEKISTWSQKPLHGKHRYRVTQDHINKKQSYTWLQDGQLFPETEGFMLAIQDQVIATRNYKKYIIKDPSITDDNCRKCQQQKETIDHITSGCKTLAGTEYTARHNSAAKVIHQALATTNKLIENTDPYYNYTPTSVLENDQYKLYWDVQIHTDKTIPANRPDIVFQSKLDKVTYLIDIAIPNDVNIQNTYAGKISKYTDLAMEIKRLWKQDKVTIVPLIMSVSGLTPNTFTPHLQQLGLDEKLHKTFQKSVILKTCNIVRSFLNSDQ

SEQ ID NO: 32255 - protein, 1158 aa, Callosobruchus maculatus
MDKVSFSNNQRRPRVRRLNSPEPQNQTQQPTAHNPTADVLPVQPATTKAGKPRQRLQWTTEMNKSVMHCYYTATKLETISTGYRHELYRLFTAQYPHLSTRVTEQRLIDQKRVITKNNRLTPQELQAIKSLVSNEINTVTPNDSLADESITERQNNHTRSNQTPNTDTTNNTSIHLDVDSEHEHTPDTPNQTSINLPSTATQSQNVTPPPCITQSTEQVMNTQYNKWCGTNPTLRDPLPRLIFKNNTRQILQTVNSNIIPQFLTKDSNLEDIHTVIYAAAATTLIVNGQKLPKRSKDHTSKRSKPKWQIRIENKISTIRKDLAHVTQYIHKNNLSKRIQTTINRLKSRSPQQTISEIYDTLKQKLAVYAARLRRYNESNDRKDTNNLFQKSERQFYQKITSNNQITTIEPPSRKELTDFWGSLWSEPKTHNENAPWIRQEEEKQQHIPEQGDVILTPQEIAETIKHTHNWKCPGVDNVQNFWYKQFSATYEILTDQINKAILQPNRLPKFLTQGVTYIKPKNADTKNPANYRPITCLPTLYKIITATIGKRIEQHLTQNNILTEEQKGCRKQSQGCKEQLIIDSVIMEQTRKEHRNLHTCFIDYKKAFDSVPHSWLTKTLQIYKINPTLRQFLTRTMETWRTNIHLKTQDGHIQTEELCIRRGIFQGDSLSSLWFCLCLNPLSNALNNTNYGFNIRHQKVNQHRISHLLYMDDIKLYAATEVQLKELLKITEVCTSDVRMEFGMSKCKVLHIHKGQWKNHSEQEILTGQTLDNMEKDETYKYLGFNQNIKIDHSEVKAQLTQEFRDRLITLLKTKLNSKNLTKAINTFAIPVLTYSFGIIKWSHTDIENINILIRTELTKHRMSHPKACKERLTIDRKHGGRGIIDIQSLHTRQIKTLRDFFQSKETNLHRSIVKADKNYTPLTLSRPDHPADAHNHIELQQEKINTWSQKALHGKHRYRVTQDHINERQSYTWLQDGQLFPETEGFMLAIQDQVIATRNYMKYIIKDTSITDDNCRKCHQQKETIDHITSACKTLAGTEYTARHNSAAKVIHQALATTNKLIENTDPYYNYTPTSVLENNEYKLYWDVEIHTDKTIPANRPDIVFQSKADKVTYLIDIAIPNDTNIQNAYAGKISKYTDLAIEIKRLGSKTKLPLSP

SEQ ID NO: 32256 - protein, 1245 aa, Callosobruchus maculatus
MHRVTSKNNQRRPRVRRLNSPEPQTQTEQPIERNPAADVLPAQPATTKAGKPRQRLQWTTEINKSVMHCYYTATKLETISTGYRHELHRLFIAQYPHLAERVTEQRLIDQKRVITKNNRLTPEELQAIKILVSNEINTPHQNDPQASNTTTSDNTTIPTEIDPEHEHTQDTPDNAVQPNDSLAIESITEGDTIHTQNNQPPNKDTTNNTSIHFEIDPEHNHAPHTPETTCTNLPSTATQSQNITLPPAITQSAKQVMNTQYNKWCGTNPVLRDPLPRLIFKNNTRQILHTINANIIPQFSTNDSDLEDIHTVIYAAAATTLIVNGQKLPKRSKNHTSKRSKPKWQIRIENKISTLRKDLAHVTQYTNNNNLSKRIQTTINRLKSKSPQQTIPEIADTLKQKLAVYAARLRRYNESNDRKDANNLFQRSEKQFYQKMTSNNQITTTEPPSRQELTEFWGSLWSEPKTHNENAAWIRQEEEKHQHIAEQEDIVLTPEEIAETIKHTHNWKCPGVDNVQNFWYKQFSATYEMLTEQINKAILQPNRLPKFLTQGITYIKPKNADTRNPANYRPITCLPTLYKIITATIGKRIEQHLTQNNILTEEQKGCRKQSQGCKEQLIIDSVIMEQTRKEHRNLHTCFIDYKKAFDSVPHSWLKKTLQIYKINPVLRQFLTRTMETWRTNIHLKTQDGHIQTEELLIRRGIFQGDSLSSLWFCLCLNPLSNALNNTNYGFNIRHQKVNQHRINHLLYMDDIKLYAATEVQLKELLRITEVCTSDVRMEFGMSKCKVLHINKGQWKNQAEQEILTGQTLDNMDKDETYKYLGFNQNIKIDHTQVKAQLTQEFRDRLVKLLKSKLNSKNLTKAINTFAIPVLTYSFGIIKWSHTDIENIHILIRTELTKHRMSHPNACKERLTIDRKQGGRGFIDIQSLRARQIKTLRQFFQSKQTNLHRAIAKADKSYTPLNLSCLDHAADTHNPIQSQQEKINTWSQKPLHGKHRYRITQDQINEKQSYTWLQDGQLFPETEGFMLAIQDQVIATRNYKKYVIKDPSITNDNCRKCHQQKETIDHITSACKTLAGTEYTARHNSAAKIIHQALATKNKLIDNSDPYYKYTPTSVLDNDHYKLYWDVEIHTDKTINANRPDIVFQTKADKVTYLIDIAIPNDVNVQNTYAGKISKYTDLAIEVKRLWKQDKVIIVPLIMSVSGLTPNTFTQHLQQLGLDERLHKIFQRSVILKTCNIVRSFLNSDQ

SEQ ID NO: 32257 - protein, 1208 aa, Callosobruchus maculatus
MDKVSFSNNQRRPRVRRLNSPEPQSQTQQPIAHNPTADVLPVQPATTKAGKPRQRLQWTTEMNKSVMHCYYTATRLETISTGYRHELYRLFTAQYPHLSTRVTEQRLIDQKRVITKNNRLTPQELQAIKSLVSNEINTVTPNDSLADESITERQNNHTGSNQTPNTDTTNNTSIHLDVESEHEHIPDTPDQTSINLPSTATQSQNVTPPPCITQSTEQVMNTQYNKWCGTNPTLRDPLPRLIFRNNTRQILQTVNSNIIPQFLTKDSNLEDIHTVIYAAAATTLIVNGQKLPKRSKDHTSKRSKPKWQIRIENKISTIRKDLAHVTQYIHKNNLSKRIQTTISRLKSRSPQQTISEIYDTLKQKLAVYAARLRRYNESNDRKDTNNLFQKSERQFYQKITSNNQITTIEPPSRKELTDFWGSLWSEPKTHNENAPWIRQEEEKQQHIPEQGDVILTPQEIAETIKHTHNWKCPGVDNVQNFWYKQFSATYEMLTDQINKAILQPNRLPKFLTQGVTYIKPKNADTKNPANYRPITCLPTLYKIITATIGKRIEQHLTQNNILTEEQKGCRKQSQGCKEQLIIDSVIMEQTRKEHRNLHTCFIDYKKAFDSVPHSWLTKTLQIYKINPTLRQFLTRIMETWRTNIHLKTQDGHIQTEELYIRRGIFQGDSLSSLWFCLCLNPLSNALNNTNYGFNIRHQKVNQHRISHLLYMDDIKLYAATEVQLKELLKITEVCTSDVRMEFGMSKCKVLHIHKGQWKNHSEQEILTGETLDNMEKDETYEYLGFNQNIKIDHSEVKAQLTQEFRDRLITLLKTKLNSKNLTKAINTFAIPVLTYSFGIIKWSHTDIENINILIRTELTKHRMSHPKACKERLTIDRKHGGRGIIDIQSLHTRQIKTLRDFFQSKETNLHRSIVKADKNYTPLTLSRPDHPADAHNHIELQQEKINTWSQKALHGKHRYRVTQDHINERQSYTWLQDGQLFPETEGFMLAIQDQVIATRNYMKYIIKDTSITDDNCRKCHQQKETIDHITSACKTLAGTEYTARHNSAAKVIHQALATTNKLIENTDPYYNYTPTSVLENNEYKLYWDVEIHTDKTIPANRPDIVFQSKADKVTYLIDIAIPNDTNIQNAYAGKISKYTDLAIEIKRLWKQNKVTIVPLIMSVSGLTPNTFTPHLQQLGLDERLQKIFQKSVILKTCNIVRSFLNSDP

SEQ ID NO: 32258 - protein, 988 aa, Callosobruchus maculatus
MNAQFNKWCGTNPTLRDPLPRLIFNSNTQKILHTINTNIIPQFLTSGSNLEDIHTVIYAAAAATLIVNGQKLPKRSNNHTSKRSKPKWQMRIENKISTIRKELAHLAQYTKNNNRSKRIQTTIDILKSKSPQKSIPEITDILKQKLAVYAARLRRYNESNDRKDANNLFQKSEKQFYKKITTDNQITAIELPSKQELTEFWGSLWSEPKTHNENAPWIRQEEEKHQQIAEQGDVILTPEEIAETIKHTHNWKCPGVDNIQNFWYKQFSSVYEVLTDQINKAILQPNRLPKFLTQGITYIKPKNADTKNPANYRPITCLPTLYKIITATICRRIEKHLTENNILTEEQKGCRKQSQGCKEQLIIDSVIMEQTRKEHRNLHTCFIDYKKAFDSVPHSWLTKTLQIYKINPGLRQFLTRTMETWRTNIHLQTEDGHIQTDELHIRRGIFQGDSLSSLWFCLCLNPLSNTLNSTNCGFTIRHQKTNQHKINHLLYMDDLKLYAATEVQLRELLRITEVCTSDIKMEFGMSKCKVLHINKGQWKNHPEQEVVTGQALDNMDKDETYKYLGINQNAKIDHTKIKSQLTEEFKDRLIRLLKTKLNSKNLTKAINTFAIPILTYSFGIIKWSHTDIENIHILIRTELTKHRMSHPKACKERLTIDRKQGGRGIIDIQSLHAKQIKSLRHFFHSKQTNLHKAIVKADKNYTPLALSCPDHAADAHNHIQAQQEKINTWSQKALHGKHRYRVTQDHINEKESYTWLQDGQLFPETEGFMLAIQDQVIATRNYRKYIMKDPSISDDNCRKCHQQKETIEHITSGCKTLAGTEYTARHNSAAKVIHQALATTNKLIENTDPYYNYTPTSVLENNQFKLYWDIEIHTDKTIPANRPDIVFQSKTDKVTYLIDIAVPNDMNIQNTYAGKISKYTDLAIEIKRLWKQNKVVIVPLIMSVSGLTPNTFTPHLQQLGLDEKLHKTFQKSVILKTCSIVRSFLNSE

SEQ ID NO: 32259 - protein, 1207 aa, Callosobruchus maculatus
MDKVSFSNNQRRPRVRRLNSPEPQSQTQQPIAHNPTADVLPVQPATTKAGKPRQRLQWTTEMNKSVMHCYYTATRLETISTGYRHELYRLFTAQYPHRSTRVTEQRLIDQKRVITKNNRLTPQELQAIKSLVSNEINTVTPNDSLADESITERQNNHTGSNQTPNTDTTNNTSIHLDVESEHEHIPDTPDQTSINLPSTATQSENVTPPPCITQSTEQVMNTQYNKWCGTNPTLRDPLPRLIFKNNTRQILQTVNSNIIPQFLTKDSNLEDIHTVIYAAAATTLIVNGQKLPKRSKDHTSKRSKPKWQIRIENKITTIRKDLAHVSQYIHKNNLSKRIQTTISRLKSRSPQQTISEIYDTLKQKLAVYAARLRRYNESNDRKDTNNLFQKSERQFYQKITSNNQITIEPPSRKELTDFWGSLWSEPKTHNENAPWIRQEEEKQQHIPEQGDVILTPQEIAETIKHTHNWKCPGVDNVQNFWYKQFSATYEMLTDQINKAILQPNRLPKFLTQGVTYIKPKNADTKNPANYRPITCLPTLYKIITATIGKRIEQHLTQNNILTEEQKGCRKQSQGCKEQLIIDSVIMEQTRKEHRNLHTCFIDYKKAFDSVPHSWLTKTLQIYKINPTLRQFLTRIMETWRTNIHLKTQDGHIQTEELYIRRGIFQGDSLSSLWFCLCLNPLSNALNNTNYGFNIRHQKVNQHRISHLLYMDDIKLYAATEVQLKELLKITEVCTSDVRMEFGMSKCKVLHIHKGQWKNHSEQEILTGETLDNMEKDETYKYLGFNQNIKIDHSEVKAQLTQEFIDRLITLLKTKLNSKNLTKAINTFAIPVLTYSFGIIKWSHTDIENINILIRTELTKHRMSHPKACKERLTIDRKHGGRGIIDIQSLHTRQIKTLRDFFQSKETNLHRSIVKADKNYTPLILSRPDHPADAHNHIELQQEKINTWSQKALHGKHRYRVTQDHINERQSYTWLQDGQLFPETEGFMLAIQDQVIATRNYMKYIIKDTSITDDNCRKCHQQKETIDHITSACKTLAGTEYTARHNSAAKVIHQALATTNKLIENTDPYYNYTPTSVLENNEYKLYWDVEIHTDKTIPANRPDIVFQSKADKVTYLIDIAIPNDTNIQNAYAGKISKYTDLAIEIKRLWKQNKVTIVPLIMSVSGLTPNTFTPHLQQLGLDERLHKIFQKSVILKTCNIVRSFLNSDP

SEQ ID NO: 32260 - protein, 1208 aa, Callosobruchus maculatus
MDKVSFSNNQRRPRVRRLNSPEPQSQTQQPIAHNPTADVLPVQPATTKAGKPRQRLQWTTEMNKSVMHCYYTATRLETISTGYRRELYRLFTAQYPHLSTRVTEQRLIDQKRVITKNNRLTPQELQAIKSLVSNEINTVTPNDSLADESITEGQNNHTGSNQTPNTDTTNNTSIHLDVESEHEHIPDTPDQTSINLPSTATQSQNVTPPPCITQSTEQVMNTQYNKWCGTNPTLRDPLPRLIFRNNTRQILQTVNSNIIPQFLTKDSNLEDIHTVIYAAAATTLIVNGQKLPKRSKDHTSKRSKPKWQIRIENKISTIRKDLAHVTQYIHKNNLSKRIQTTISRLKSRSPQQTISEIYDTLKQKLAVYAARLRRYNESNDRKDTNNLFQKSERQFYQKITSNNQITTIEPPSRKELTDFWGSLWSEPKTHNENAPWIRQEEEKQQHIPEQGDVILTPQEIAETIKHTHNWKCPGVDNVQNFWYKQFSATYEMLTDQINKAILQPNRLPKFLTQGVTYIKPKNADTKNPANYRPITCLPTLYKIITATIGKRIEQHLTQNNILTEEQKGCRKQSQGCKEQLIIDSVIMEQTRKEHRNLHTCFIDYKKAFDSVPHSWLTKTLQIYKINPTLRQFLTRIMETWRTNIHLKTQDGHIQTEELYIRRGIFQGDSLSSLWFCLCLNPLSNALNNTNYGFNIRHQKVNQHRISHLLYMDDIKLYAATEVQLKELLKITEVCTSDVRMEFGMSKCKVLHIHKGQWKNHSEQEILTGETLDNMEKDETYKYLGFNQNIKIDHSEVKAQLTQEFRDRLITLLKTKLNSKNLTKAINTFAIPVLTYSFGIVKWSHTDIENINILIRTELTKHRMSHPKACKERLTIDRKHGGRGIIDIQSLHTRQIKTLRDFFQSKETNLHRSIVKADKNYTPLTLSRPDHPADAHNHIELQQEKINTWSQKALHGKHRYRVTQDHINERQSYTWLQDGQLFPETEGFMLAIQDQVIATRNYMKYIIKDTSITDDNCRKCHQQKETIDHITSACKTLAGTEYTARHNSAAKVIHQALATTNKLIENTDPYYNYTPTSVLENNEYKLYWDVEIHTDKTIPANRPDIVFQSKADKVTYLIDIAIPNDTNIQNAYAGKISKYTDLAIEIKRLWKQNKVTIVPLIMSVSGLTPNTFTPHLQQLGLDERLQKIFQKSVILKTCNIVRSFLNSDP

SEQ ID NO: 32261 - protein, 1031 aa, Callosobruchus maculatus
MDSGHEHIPDTPDQTSINLPLTATQSQKVTPPPSITQSTEQVMDTQYNKWCGTNPALRDPLPRLIFKNNTQQILHTINSNIIPQFLTNVSNLEDIHTVIYAAAATTLTVNGQKLPKRSKDHTSNRPKPKWQIRIENRISAIRKDLAHLAQYTNNNNRSKRIQTTIDILKSKSPQKSIPEIADTLKQKLAVYAARLRRYNESNERKNANNLFQRSEKQFYQKITANNQEATIEPPSRQDLTEFWSSLWSEPKTHNHDAPWIRQEEENHQHIMEQGDVILTPEEIAETIKHTHNWKCPGVDNIQNFWYKQFSSTYEVLTDQINKAILQPNRLPKFLTQGITYIKPKNTDTKNPANYRPITCLPTLYKIITATICRRIEQHLTQNNILTEEQKGCRKQSQGCKEQLIIDSVIMEQTRKEHRNLHTCFIDYKKAFDSVPHSWLKKTLQIYKINSGLRQFLTRIMETWRTNIHLKTQHGHIQTDELHIRRGIFQGDSLSSLWFCLCLNPLSNALNNTNCGFNIRHEKVNQHKINHLLYMDDIKLYAATEVQLRELLRVTEVCTSDVRMEFGMSKCKVLHINKGQWKSHQERETLTGQTLDNMDKGETYKYLGFNQSVKIDHSQVKEQLIQEFRDRLIKLLKTKLNSRNLTKAINTFAIPVITYSFGIIKWSHTDIENIQILIRTELTRHRMSHPNACKERLTIDRKQGGRGIIDIQSLRTKQIKTLRHFFQSKQTNLHRAIVKADKNYTPLTLSSPNHAADTHNPIESQQEKINTWSQKALHGKHRYRITQDHINEKQSYTWLQEGQLFPETEGFMLAIQDQVIATRNYKKYIIKDPSVTNDNCRKCHQQKETIDHITSACKTLAGTEYTARHNSAAKIIHQALATTNKLIENTAPYYNYTPTSVLDNNQYKLYWDVEIHTDKTIPANRPDIVFQSKADKVTYLIDIAIPNDTNVQTAYAGKISKYTDLAIEVKRLWKQNKVVIVPLIMSVSGLTPNTFTPHLHQLGLDEKLHKIFQKSVILKTCNIVRSFLNSDQ

SEQ ID NO: 32262 - protein, 1241 aa, Callosobruchus maculatus
MHKVTSKNNQRRPRVRRLNSPEPQAQTEQPIERNPAADVLPAQMATTKAGKPRQRLQWTTEINKSVMHCYYTATKLETISTGYRHELRRLFIAQYPHLAERVTEQRLIDQKRVITKNNRLTPEELQAIKVLVSSEMNTAYPNDPQTSNITTTDNTSIHLEIDPEHEHTQDIPDTAVQPNDSLAIETITEGPAIHSRNNQPPNKDTTNNTSIHLEIDPEHDHTPETTCTNLPSTTTQNQNITIPAVITQSAEQVMYTQYNKWCGTNPVLRDPLPRLIFKNNTRQILHTINANIIPQFLTNDSDLEDIHTVIYAAAAATLIVNGQKLPKRSKNHTNKRSKPRWQIRIENKISTLRKDLAHLTQYTNNNNLSKRIQTTIDRLKSKSPQQTIPEIADTLKQKLAVYAARLRRYNESNDRKDANNLFQKSEKQFYQKITSTTQITTIEPPTRQELTEFWGNLWSEPKTHNDNAPWIRQEEEKQQHIPEQGDVILTPQEIAETIKHTHNWKCPGVDNVQNFWYKQFTATYELLTNQINKALLQPNRLPKFLTQGITYIKPKNADTRNPANYRPITCLPTLYKIITATIGKRIEQHLTQNSILTEEQKGCRKQSQGCKEQLIIDSVIMEQTRKEHRNLHTCFIDYKKAFDSVPHSWLKKTLEIYKINPGLRQFLTTTMETWRTNIYLQTEDGHIQTDELHIRRGIFQGDSLSSIWFCLCLNPLSNTLNDTNCGFTIRHQKVNLHKINHLLYMDDIKLYAATEVQLRELLRITEVCTSDMRMEFGMSKCKVLHINKGQWKNHPQQEVVTGQTLDNMDKDETYKYLGFNQNVKIDHTQVKAQLTREFKDRLTRLLKTKLNSRNITKAINTFAIPVLTYSFGIIKWSHTDIENIHILIRTEFTKHRMSHPNACKERLNIDRKQGGRGIIDIHSLHTKQIKTLRYFFHSKQTNLHKAIVKADKNYTPLALSCPDHAADAHDHIQSQQEKINTWSQKALHGKHRYRVTQDHINKNQSYTWLQDGQLFPETEGFMLAIQDQVIATRNYKKYIIKDPSITDDSCRKCHQQKETIEHITSGCKTLAGTEYTARHNSAAKVIHQALATTNKLTENTDPYYNYTPTSVLENNKFKLYWDIEIHTDKTIPANRPDIVFQSKADKVTYLIDIAIPNDMNIQSTYTGKISKYTDLAIEIKQLWKQDKVIIVPLIMSVSGLTPNTFTPHLQQLGLDEKLHKTFQKSVILKTCSIVRSFLNSE

SEQ ID NO: 32263 - protein, 1260 aa, Callosobruchus maculatus
MDKVNLINNPRRPRVRRLNSPESQTRTQQPIAHNPVADVLPAQPATTKAGKPRQRLQWTTEMNKFVMRCYYTATKLETISTGYRHELHRLFIAQYPHLAERVTEQRLIDQKRVITKNNRLTRQELEAVQELVANEINTVHPIDSLVTESITETQNIHTRNNQTTNTATTNNISIQSEIDSQHEHTPNTPDITFTNLPATTTQSQQISQPPSVTQSAEAVNTAQPPSISGEPEQMTNSRTTQFNKRCNTTTQNQNQNIARSPSITQTAEQVMNTQFNKWCGTNPALRDPLPRLIFRNNTQQILHTINTNLIPQFITNNSNLEDIHTVIYAAAATTLIVNGQKLQKRSKDQRSNRAKPKWQIRIENKISTLRKDLAHLAQYSNNNNHPSKHIQRTVNIMKSKSPQKSIPEIADTLKQKLAVYAARLRRYNESNDRKDANNLFQKSEKQFYQKITSNNQITTIEPPSRQELTAFWRSLWSEPKTHNENAPWIRQEETKHQHITVQGNVILTTEEIAETIKHTHNWKCPGVDNVQNFWYKQFSSTYEMLTDQINKAILQPNRLPKFLTQGITYIKPKNADTKNPANYRPITCLPTLYKIITATICRRIEQHLMQNNILTEEQKGCRKHSQGCKEQLIIDSVIMEQTRKEHRNLHTCFIDYKKAFDSVPHSWLMKTLQIYKINPGLRQFLKSTMETWRTNIHLQTHDGHIQTDELHIRRGIFQGDSLSSLWFCLCLNPLSNTLNSTNHGFNIRHHKADQHKINLLLYMDDIKLYAATEVQLRELLKITELYTSDIRMEFGMSKCKVLHINKGQWKNQREKEVVTGQPLDNMDKDETYKYLGFNQNVKIDHTQVKAQLTQEFKDRLIKLLKTKLNSKNLTKAINTFAIPVLAYSFGIIKWSHTDIENIHILIRTELTKHRMSHPNACKERLAIDRKLGGRGIIDIQSLRTTQIQTLRHFFHTKQTNLHKAIVKADKNYTPLNLSSPDHVADTYNHIQSQQEKINTWSQKALHGKHRYRVTQDHINQKQSYAWLQDGQLFPETEGFMLAIQDQVIATRNYKKYIIKDPSITDDNCRKCQQQKETIDHITSGCKTLAGTEYTARHNSAAKVIHQALATTNKLIENTDPYYNYTPTSVLENDQYKLYWDVEIHTDKTIPANRPDIVLQSKADKITYLIDIAIPNDVNIQNTYAGKISKYTDLAMEIKRLWKQNKVTIVPLIMSVSGLTPSTFTQHLQQLGLDEKLHKVFQKSVILKTCNIVRSFLNSDQ

SEQ ID NO: 32264 - protein, 1245 aa, Callosobruchus maculatus
MHKVTSKNNQRRPRVRRLNSPEPQTHTEQPREHNPAADVLPAQPATTKAGKPRQRLQWTTEINKHVMHCYYTATKLETISTGYRHELHRLFIAQYPHLAERVTEQRLIDQKRVITKNNRLTPEELQAIKILVSNEINTAHPNHTQTSNKTTIDSTSTHSETDPEHEHTQHVPDTAVQPNDSLATELITERHAIRTRNNQPTDTGTTNNTSIHLELDVENDHIPDTPETTRTNLPATTTQSQNVTIPPAITQSAEQVMNTQYNKWCGTNPTLRDPLPRLIFKNNTLQILHTINVNIIPQFLTKDSDLEDIHTVIYAAAATTLTLNGQKIPKRSIARTTERSKPKWQIRIENKISTIRKDLAHLAQYTNNNNRSKRIQTTINILKSKSPQQTISEIADTLKQKLAVYAARLRRYNESNARKDANNLFQKSEKQFYQKITADNQITAIEPPSKQELTEFWGSLWSEPKTHNENAPWIRQEEEKHQHIVEQGDVILTPEEIAETIKHTHNWKCPGVDNVQNFWYKQFSATYEMLTDQINKAILQPNRLPKFLTQGITHIKPKNADTKNPANYRPITCLPTLYKIITATICRRIEQHLTQNNILTEEQKGCRKHSQGCKEQLIIDSVIMEQTRKEHRNLHTCFIDYKKAFDSVPHSWLAKTLQIYKINPGLRQFLTRTMETWHTNIHLKTQDGHIKTDELHIRRGIFQGDSLSSLWFCLCLNPLSNALKNTNCGFNIRHERLNQHKINHLLYMDDIKLYAANEVQLRELIRITEVCSSDVRMEFGMSKCKVLHINKGQWKDHPEQETVTGQTLNNMNKDETYKYLGFNQNVKIDHTKVKAQLTQEFRDRLIKLLKTKLNSRNLTKAINTFAIPVLTYSFGIIKWSHTDIENIHILIRTELTKHRMSHPNACKERLTIDRKQGGRGIVDIQSLRTRQIKTLRHFFQNKQTNLHRAIVKADRNYTPLNLSCPDHAADTHNPTQSQQEKINTWSQKPLHGKHRYRITQDHINEKQSYTWLQDGQLFPETEGFMLAIQDQVIATRNYKKYIIKDPSITEDRCRKCHQQKETIDHITSGCKVLAGTEYTARHNSAAKVIHQALATTNKLIQNTDPYYNYTPTSVLENDRYKLYWDVEIHTDKTIPANRPDIVFQSKADKITYLIDIAIPNDVNVQNTYAGKISKYTDLAMEIKRLWKQNKVTIVPLIMSVSGLTPNTFTQHLQQLGLDEKLHKVFQKSVILKTCNIVRSFLNSDQ

SEQ ID NO: 32265 - protein, 1260 aa, Callosobruchus maculatus
MDQVNLINNPRRPRVRRLNSPESQTRTQQPIAHNPAADVLPAQPATTKSGKPRQRLQWTTEMNKFVMRCYYTATKLETISTGYRHELHRLFIAQYPHLAERVTEQRLIDQKRVITKNNRLTPQELQAVKKLVANEINTVHPIDSLVTESITETQNIHTRNNQTTNTATTNNISIQSEIDSEHEHTPNTPDITFTNLPATTTQSQQISQPPSFTQSAEAVNTAQPPSISGEPEQMTNSRTTQFNKRCNTTRQNQNQNIARSPSITQTAEQVMNTQFNKWCGTNPALRDPLPRLIFKNNTQQILHTINTNLIPQFITNNSSLEDIHTVIYAAAATTLIVDGQKLQKCSKDQRSNRAKSKWQIRIENKISMLRKDLAHLAQYSNNNNHPSKHRQRTINIMKSKSPQKSIPEIADTLKQKLAVYAARLRRYNESNGRKDANNLFQKSEKQFYQKITSNNQITTIEPPSRQELTAFWRSLWSEPKTHNENAPWIRQEETKHQHITEQGNVILTTEEIAETIKYTHNWKCPGVDSVQNFWYKQFSSTYEMLTDQINKAILQPNRLPKFLTQGITYIKPKNADTKNPANYRPITCLPTLYKIITATICRRIEQHLMQNNILTEEQKGFRKHSQGCKEQLIVDSVIMEQTRKDHRNLHTCFIDYKKAFDSVPHSWLMKTLQIYKINPGLRQFLKSTMETRRTNIHLQTHDGHIQTDELHIRRGIFQGDSLSSLWFCLCLNPLFNTLNSTNHGFNIRHHQADQHKINHLLYMDDIKLYAATEVQLRELLKITEVYTSDIRMEFGMSKCKVLHINKGQWKNQPEKEVVTGQPLDNMDKDETYKYLGFNQNVKIDHTQVKAQLTQEFKDLLIKLLKTKLNSKNLTKAINTFAMPVLTYSFGIIKWSHMDIENIHILIRTELTKHRMSHPNACKERLAIDRKLGGRGIIDIQSLRTTQIQTLRHFFHTKQTNLHKAIVKADKNYTPLNLSSPDHVADTYNHIPSQQEKINTWSQKALHGKHRYRVTQDHINQKQSYAWLQDGQLFPETEGFMLAIQDQVIATRNYKKYIIKDPSITDDNCRKCQQQKETIDHITSGCRTLAGTEYTARHNSAAKVIHQALATTNKLIENTDPYYNYTPTSVLENDQYKLYWDVEIHTDKTIPANRPDIVFQSKADKITYLIDIAIPNDVNIQNTYAGKISKYTDLAMEIKRLWKQNKVTIVLLIMSVSGLTPSTFTQHLQQLGLDEKLHKVFQKSVILKTCNIVRSFLNSDQ

SEQ ID NO: 32266 - protein, 989 aa, Callosobruchus maculatus
MNTQYNKWCGTNPTLRDPLPRLIFKNNTRQILQTVNSNIIPQFLTKDSNLEDIHTVIYAAAATTLIVNGQKLPKRSKDHTSKRSKPKWQIRIENKISTIRKDLAHVTQYIHKNNLSKRIQTTISRLKSRSPQQTISEIYDTLKQKLAVYAARLRRYNESNDRKDTNNLFQKSERQFYQKITSNNQITTIEPPSRKELTDFWGSLWSEPKTHNENAPWIRQEEEKQQHIPEQGDVILTPQEIEETIKHTHNWKCPGVDNVQNFWYKQFSATYEMLTDQINKAILQPNRLPKFLTQGVTYIKPKNADTKNPANYRPITCLPTLYKIITATIGKRIEQHLTQNNILTEEQKGCRKQSQGCKEQLVIDSVIIEQTRKEHRNLHTCFIDYKKAFDSVPHSWLTKTLQIYKINPTLRQFLTRIMETWRTNIHLKTQDGHIQTEELYIRRGIFQGDSLSSLWFCLCLNPLSNALNNTNYGFNIRHQKVNQHRINHLLYMDDIKLYAATEVQLKELLKITEVCTSDVRMEFGMSKCKVLHIHKGQWKNHSEQEILTGETLDNMEKDETYKYLGFNQNIKIDHSEVKAQLKQEFRDRLITLLKTKLNSKNLTKAINTFAIPVLTYSFGIIKWSHTDIENINILIRTELTKHRMSHPKACKERLTIDRKHGGRGIIDIQSLHTRQIKTLRDFFQSKETNLHRSIVKADKNYTPLTLSRPDHPADAHNHIELQQEKINTWSQKALHGKHRYRVTQDHINERQSYTWLQDGQLFPETEGFMLAIQDQVIATRNYMKYIIKDTSITDDNCRKCHQQKETIDHITSACKTLAGTEYTARHNCVAKVIHQALATTNKLIENTDPYYNYTPTSVLENNEYKLYWDVEIHTDKTIPANRPDIVFQSKADKVTYLIDIAIPNDTNIQNAYAGKISKYTDLAIEIKRLWKQNKVTIVPLIMSVSGLTPNTFTPHLQQLGLDERLHKTFQKSVILKTCNIVRSFLNSDP

SEQ ID NO: 32267 - protein, 899 aa, Callosobruchus maculatus
MRIENKITTIRKELAHLAQYTNNNNRSKRIQTTIDILKSKSPQKSIPEITDTLKQKLAVYAARLRRYNESNDRKDANNLFQKSEKQFYKKITTDNQITAIELPNKQELTEFWGSLWSEPKTHNENAPWIRQEEEKHQHIAEQGDVILTPEEIAETIKHTHNWKCPGVDNIQNFWYKQFSSVYEVLTNQINQAILQPNRLPKFLTQGITYIKPKNADTKNPANYRPITCLPTLYKIITATICRRIEKHLTENSILTEEQKACRKQSQGCKEQLIIDSVIMEQTRKEHRTLHTCFIDYKKAFDSVPHSWLTKTLQIYKINPGLRQFLTRTMETWRTNIHLQTEDGHIQTDELHIRRGIFQGDSLSSLWFCLCLNPLSNTLNSTNCGFTIRHQKANQHKINHLLYMDDLKLYAATEVQLRELLRITEVCTSDIKMEFGMSKCKVLHINKGQWKNHPEQEVVTGQALDNMDKNETYKYLGINQNAKIDHTKIKSQLTQEFKDRLIRLLKTKLNSRNLTKAINTFAIPILTYSFGIIKWSHTDIENIHILIRTELTKHRMSHPKACKERLTIDRKQGGRGIIDIQSLHAKQIKSLRHFFHSKQTNLHKAIVKADKNYTPLALSCPDHAADAHNHIKAQQEKINTWSQKALHGKHRYRVTQDHINEKQSYIWLQDGQLFPETEGFMLAIQDQVIATRNYRKYIMKDPSISDDNCRKCHQQKETIEHITSGCKTLAGTEYTARHNSAAKVIHQALATTNKLIENTDPYYNYTPTSVLENNQFKLYWDMEIHTDKTIPANRPDIVFQSKTDKVTYLIDIAIPNDMNIQNTYAGKISKYTDLAIEIKRLWKQNKVVIVPLIMSVSGLTPNTFTPHLQQLGLDEKLHKTFQKSVILKTCSIVRSFLNSE

SEQ ID NO: 32268 - protein, 1244 aa, Callosobruchus maculatus
MDKVTFAKNQRRPRVRRLNSPEPQIQTPEQPIALNPASDVLPVQPATTKAGKPRQRLQWTTEMNKSVMHCYYTATKLETISTGYRHEFHRLFTAQYPHLSTRVTEQRLIDQKRVITKNNRLTPLELQAIKNLVANETNTVQPNDSLASESITETQLIQTRNNQSPNTDTTNKTGKKSPVSNEIKMVESITETQNTLSRNNQTPDATNKTNIHFEINPEHEHTPDTPNTQFTNSPSTITQNRNINRPPSITQSAEEVMNIQFNKWCGTNPTLRDPLPRLIFKNNTQQILNTINSKIISQFLTSVSNLEEIHTVIYAAAATTLIVNGQKLPKRSKDHTSKMSKPKWQVRIENKISTIRKDLAHLAQYTNNNRSKRIQTTIDILESKSPQKSIPEIADTLKQKLAVYAARLRRYNESNERKNANNLFQKSEKQFYQKITANNQEATTDPPSRQELTEFWSSLWSEPKTHNQDAPWIRQEEEKHQHIMEQGDVILTPEEIAETIKHTHNWKCPGVDNIQNFWYKQFSSTYEVLTDQINKAILQPNRLPKFLTQGITYIKPKNADIKNPANYRPITCLPTLYRIITATICRRIEQHLTQNNILTEEQKGCRKQSQGCKEQLIIDSVIMEQARKEHRNLHTCFIDYKKAFDSVPHSWLKKTLQIYKINPGLRQFLTRNKETWRTNIHLKTQHGHIQTDELHIRRGIFQGDSLSSLWFCLCLNPLSNALNNSNCGFNIRHAKVNQHKINHLLYMDDIKLYAATEIQLRELLRITEVCTSDVRMEFGMSKCKVLHINKGQWKSHQEREIVTGQTLDNMDKDETYKYLGFNQSVKIDHSQVKEQLIQEFRDRLIKLLKTKLNSRNLTKAINTFAIPVLTYSFGIIKWSHTDIENIQILIRTELTKHRMSHPNACKERLTIDRKQGGRGIIDIQSLRTKQIKTLRHFFRSKQTNLHRAIVKADKNYTPLTLSNPDHTADTHNPIESQQEKINTWSQKALHGKHRYRITQDHINEKQSYTWLQDGQLLPETEGFMLAIQDQVIATRNYKKYIIKDPSVTNDNCRKCQQQKETIDHITSACKTLAGTEYTARHNSAAKIIHQALATTNKLIENTDPYYNYTPTSVLDNNQYKLYWDVEIHTDKTFTANRPDIVFQSKADKVTYLIDIAIPNDTNIQTTYAGKISKYTDLAIEVKRLWKQNKVVIVPLIMSVSGLTPNTFTPHLHQLGLDEKLHKIFQKSVILKTCSIVRSFLNSDQ

SEQ ID NO: 32269 - protein, 622 aa, Callosobruchus maculatus
MEQTRKEHRNLHTCFIDYKKAFDSVPHSWLTKILQIYKISPGLRQFLAKTMKTWRTNIHLTTQDGHIQTEELHIRRGIFQGDSLSSLWFCLCLNPLSNALNNTNYGFNIRHQKVNQHRINHLLYMDDIKLYAATDVQLRELLRITEVYTSDVRMEFGMNKCKVLHINKGQWKNHPEQEIVTGQTLDNMDKEETYKYLGINQRVKIDHTQIKAELRQVFRDRLIKLLKTKLNSRNLTKAINTFAIPILTYSFGIIKWSHTDIENIHILIRTELTKHRMSHPNACKERLTIDRTQGGRGITDIQSLRTRQIKTLRHFFQNKQTNLHRAIVKADKNYTPLNLSCPDHVADTHNPTQSQQEKISTWSQKPLHGKHRYRVTQDHINKKQSYTWSQDGQLFPETEGFMLAIQDQVIATRNYKKYIIKDPSITDDNCRKCQQQKETIDHITSGCKTLAGTEYTARHNSAAKVIHQALATTNKLIENTDPYYNYTPTSVLENDQYKLYWDVQIHTDKTIPANRPDIVFQSKLDKVTYLIDIAIPNDVNIQNTYAGKISKYTDLAMEIKRLWKQDKVTIVPLIMSVSGLTPNTFTPHLQQLGLDEKLHRTFQKSVILKTCNIVRSFLNSDQ

SEQ ID NO: 32270 - protein, 1243 aa, Callosobruchus maculatus
MHKVTSKNNQRRPRVRRLNSPEPQTQTEQPRQHNPAADVLPAQPATTKAGKPRQRLQWTTEINKHVMHCYYTATQLETISTGYRHELHRLFIAQYPHLAERVTEQRLIDQKRVITKNNRLTPEELQAIKILVSNEINTAHPNHPQTSNRTTIDNIHSIHSETDPEHEHTQHIPDSAVQPNDSLATESITERHAIRTRNNQPPNTGTTNTTSIHLELDLENDHTPETTCTNLPYTATQSQNITLPPAITQSAEQVMNTQYNKWCGTNPTLRDPLPRLIFKNNTLQILHTINVNIIPQFLTKDSDLEDIHTVIYAAAATALTLNGQKLPKRSIARTTERSKPKWQIRIENKISTIRKDLAHLAQYTNNNNRSKRVQTTINILKSKSPQQTIPEIADTLKQKLAVYAARLRRYNESNARKDANNLFQKSEKQFYQKITADNQITAIEPPSKQELTEFWGSLWSEPKTHNENAPWIGQEEEKHQHIVEQEDVILTPEEIAETIKHTHNWKCPGVDNVQNFWYKQFSATYEMLTDQINKAILQPKRLPKFLTQGITYIKPKNADTKNPANYRPITCLPTLYKIITATICRRIEQHLTQNNILTEEQKGCRKQSQGCKEQLIIDSVIMEQTRKEHRNLHTCFIDYKKAFDSVPHSWLAKTLQIYKINPGLREFLTSTMESWRTSIHLKTQDGLIKTDELHIRRGIFQGDSLSSLWFCLCLNPLSNALNNTNCGFNIRHDRLNQHKINHLLYMDDIKLYAANEVQLKELIRTTEACSSDVRMEFGMSKCKVLHINKGQWKDHPQQETVAGQTLNNMNKDETYKYLGFNQNVKIDHTQVKAQLTQEFRDRLIKLLKTKLNSRNLTKAINTFAIPVLTYSFGIIKWSHTDIENIHILIRTELTKHRMSHPNACKERLTIDRKQGGRGITDIQSLRTRRIKTLRHFFQNKQTNLHRAIVKADKNYTPLNLSCPDHVADTHNPTQSQQEKISTWSQKPLHGKHRYRVTQDHINKKQSYTWLQDGQLFPETEGFMLAIQDQVIATRNYKKYIIKDPSITDDNCRKCQQQKETIDHITSGCKTLAGTEYTARHNSAAKVIHQALATTNKLIENTDPYYNYTPTSVLENDQYKLYWDVQIHTDKTIPANRPDIVFQSKLDKVTYLIDIAIPNDVNIQNTYAGKISKYTDLAMEIKRLWKQDKVTIVPLIMSVSGLTPNTFTPHLQQLGLDEKLHKTFQKSVILKTCNIVRSFLNSDQ

SEQ ID NO: 32271 - protein, 1245 aa, Callosobruchus maculatus
MHRVTSKNNQRRPRVRRLNSPKPQTQTEQPIERNPAADVLPAQPATTKAGKPRQRLQWTTEMNKSVMHCYYTATRLETISTGYRHELHRLFIAQYPHLAERVTEQRLIDQKRVITKNNRLTPEELQAIKILVSNEVNTVRQNDPQTSNTTTSDNTTIPTEIDPEHEHTQDRPDTAVQPNDSLAIESITEGHTIHTRNDQPPNKDTTKDTSIHLEIDPEHDHAPHTPETTCSNLPSTATQSQNITLPPAITQSAKQVMNTQYNKWCGTNPVLRDPLPRLIFKNNTRQILHTINANIIPQFLTNDSDLEDIHTVIYAAAATTLIVNGQKLPKRSKNHTSKRSIAKWQIRIENKISTLRKDLAHVTQYTNNNNLSKRIQTTINRLKSKSPQQTIPEIADTLKQKLAVYAARLRRYNESNDRKDANNLFQKSEKQFYQKMTSNNQITTTEPPSRQELTEFWGSLWPEPKTHNENAPWIRQEEEKHQHIAEQGDVVFTPDEIAETIKHTHNWKCPGVDNVQNFWYKQFSATYEMLTEQINKAILQPNRLPKFLTQGITYIKPKNGDTRNPANYRPITCLPTLYKIITATIGKRIEQHLTQNNILTEEQKGCRKQSQGCKEQLIIDSVIMEQTRKEHRNLHTCFIDYKKAFDSVPHSWLTKTLQIYKINPVLRQFLTRTMETWRTNIHLKTQDGHIQTEELLIRRGIFQGDSLSSLWFCLCLNPLSNALNNTNYGFNIRHQKVNQHRINHLLYMDDIKLYAATEVQLKELLRITEVCTSDVRMEFGMSKCKVLHINKGQWKNQSEQEILTGETLDNMDKDETYKYLGFNQNIKIDHTQAKAQLTQEFRNRLLKLLKSKLNSKNLTKAINTFAIPVLTYSFGIIKWSHTDIENIHILIRTELTKHRMSHPNACKERLTIDRKQGGRGIIDIQSLHTRQIKTLRDFFQSKQTNLHRSIVKADKNYTPLNLSRSDHSADGHNHIELQQEKINTWSQKALHGKHRYRVTQEHINERQSYTWLQDGQLFPETEGFMLAIQDQVIATRNYMKYIIKDTSITDDNCRKCHQQKETIDHITSGCKTLAGTEYTARHNSAAKVIHQALATTNKLIENTDPYYNYTPTSVLENNEYKLYWDVEIHTDKTIPANRPDIVFQSKADKVTYLIDIAIPNDTNIQNAYAGKISKYTDLAIEIKRLWKQNKVTIVPLIMSVSGLTPNTFTPHLQQLGLDEKLHKIFQKSVILKTCNIVRSFLNSDP

SEQ ID NO: 32272 - protein, 989 aa, Callosobruchus maculatus
MNTQYNKWCGTNPTLRDPLPRLIFKNNTLQILHTINVNIIPQFLTKDSDLEDIHTVIYAAAATTLTLNGQKLPKRSIARTTERSKPKWQVRIENKISTIRKDLAHLAQYTNNNNRSKRVQTTINILKSKSPQQTIPEIADTLKQKLAVYAARLRRYNESNARKDANNLFQKSEKQFYQKITADNQITAIEPPSKQELAEFWGSLWSEPKTHNENAPWIRQEEEKHQHIVEQGDVILTPEEIAETIKHTHNWKCPGVDNVQNFWYKQFSATYEMLTDQINKAILQPNRLPKFLTQGMTYIKPKNADTKNPANYRPITCLPTLYKIITATICRRIEQHLTQNNILTEEQKGSRKQSQGCKEQLIIDNVIMEQTRKEHRNLHTCFIDYKKAFDSVPHSWLAKTLQIYKINPGLREFLTRTMETWRTSIHLKTQNGHIKTDELHIRRGIFQGDSLSSLWFCLCLNPLSNALNNTNCGFNIRHEKLNQHRINHLLYMDDIKLYAANEVQLRELIRITETCSSDVRMEFGLSKCKVLHINKGQWKDHPQQETVAGQTLNNMNKDETYKYLGFNQNVKTDHTQVKAQLTQEFRDRLIKLLKTKLNSRNLTKAINTFAIPVLTYSFGIIKWSHTDIENIHILIRTELTKHRMSHPNACKERLTIDRKQGGRGITDIQSLRTRQIKTLRHFFQNKQTNLHRAIVKADKNYTPLNLSCSDHVADTHNPTQSQQEKISAWSQKPLHGKHRYRITQDHINEKQSYTWLQDGQLFPETEGFMLAIQDQVIATRNYKKYVIKDPSITDDKCRKCHQQKETIDHITSGCKTLAGTEYTARHNSAAKVIHQALATTNKLIENSDPYYNYTPTSVLENDQYKLYWDVEIHTDKTIPANRPDIVFQSKADKITYLIDIAIPNDVNIQNTYAGKISKYTDLAMEIKRLWKQNKVTIVPLIMSVSGLTPNTFTQHLQQLGLDKKLHKVFQKSVILKTCNIVRSFLNSDQ

SEQ ID NO: 32273 - protein, 1260 aa, Callosobruchus maculatus
MDKVNLINNPRRPRVRRLNSPESQTRTQQPIAHNPAADVLPAQPATTKAGKPRQRLQWTTEMNKFVMCCYYTATKLETISTGYRHELHRLFIAQYPHLAERVTEQRLIDQKRVITKNNRLTPQELQAVKKLVANEINTVHPIDSLVTESITETQNIHTRNNQTTNTATTNNITIQSEIDSEHEHTPNTPDITFTNLPATTTQSQQISQPPSVTQSAEAVNTAQPPSISGEPEQMTNSRTTQFNKRCNTTTQNQNQNIARSPSITQTAEQVMNTQFNKWCGTNPALRDPLPRLIFKNNTQQILHTINTNLIPQFITNNSNLEDIHTVIYAAAATTLIVNGQKLQKRSKDQRSNKAKPKWQIRIENKISTLRKDLAHLAQYSNNNNHPSKHIQRTINILKSKSPQKSIPEIADTLKQKLAVYAARLRRYNESNDRKDANNLFQKSEKQFYQKITSNNQITTIEPPSRQELTAFWRSLWSEPKTHNENAPWIRQEETKHQHITEQGNVILTTEEIAETIKHTHNWKCPGVDNVQNFWYKQFSSTYEMLTNQINKAILQPNRLPKFLTQGITYIKPKNADTKNPANYRPITCLPTLYKIITATICRRIEQHLMQNNILTEEQKGCRKHSQGCKEQLIIDSVIMEQTRKEHRNLHTCFIDCKKAFDSVPHSWLMKTLQIYKINPGLRQFLKSTMETWRTNIHLQTHDGHIQTDELHIRRGIFQGDSLSSLWFCLCLNPLSNTLNSTNHGFNIRHHKADQHKINHLLYMDDIKLYVATEVQLRELLKITEVYTSDIRMEFGMSKCKVLHINKGQWKNQPEKEVVTGQPLDNMDKDETYKYLGFNQSVKIDHTQVKAQLTQEFKDRLIKLLKTKLNSKNLTKAINTFAIPVLTYSFGIIKWSHTDIENIHILIRTELTKHRMSHPNACKERLAIDRKLGGRGIIDIQSLRTTQIQTLRHFFHTKQTNLHKAIVKADKNYTPLNLSSPDHVADTYNHIQSQQEKINTWSQKALHGKHRYRVTQDHINQKQSYAWLQDGQLFPETEGFMLAIQDQVIATRNYKKYIIKDPSITDDNCRKCQQQKETIDHITSGCKTLAGTEYTARHNSAAKVIHQALATTNKLIENTDPYYNYTPTSVLENDRYKLYWDVEIHTDKTIPANRPDIVFQSKADKITYLIDIAIPNDVNIQNTYAGKISKYTDLAMEIKRLWKQNKVTIVPLIMSVSGLTPSTFTQHLQQLGLDEKLHKVFQKSVILKTCNIVRSFLNSDQ

SEQ ID NO: 32274 - protein, 1208 aa, Callosobruchus maculatus
MDKVSFSNNQRRPRVRRLNSPESQNQTPQPIAHNPTADVLPVQPATTKAGKPRQRLQWTTEMNKSVMHCYYTATKLETISTGYRHELHRLFTAQYPHLSTRVTEQRLIGQKRVITKNNRLTPQELQAIKSLVSNETNTVPPNDSLADESTTERQNIHSRNSQTPNTDTTNDTSIHSDMDSGHEHIPDTPDQTSINLPLTATQSQKVTPPPSITQSTEQVMDTQYNKWCGTNPALRDPLPRLIFKNNTQQILHTINSNIIPQFLTNVSNLEDIHTVIYAAAATTLTVNGQKLPKRSKDHTSNRPKPKWQIRIENKISAIRKDLAHLAQYTNNNNRSKRIQTTIDILKSKSPQKSIPEIADTLKQKLAVYAARLRRYNESNERKNANNLFQKSEKQFYQKIITNNQEATIEPPSRQDLTEFWSSLWSEPKTHNQDAPWIRQEEEKHQHIMEQGDVILTPEEIAETIKHTHNWKCPGVDNIQNFWYKQFSSTYEVLTDQINKAILQPNRLPKFLTQGITYIKPKNTDTKNPANYRPITCLPTLYKIITATICRRIEQHLTQNNILTEEQKGCRKQSQGCKEQLIIDSVIMEQTRKEHRNLHTCFIDYKKAFDSVPHSWLKKTLQIYKINSGLRQFLTRIMETWRTNIHLKTQHGHIQTDELHIRRGIFLGDSLSSLWFCLCLNPLSNALNNTNCGFNIRHEKVNQHKINHLLYMDDIKLYAATEVQLRELLRITEVCTSDVRMEFGMSKCKVLHINKGQWKSHQERETLTGQTLDNMDKGETYKYLGFNQSVKIDHSQVKEQLIQEFRDRLIKLLKTKLNSRNLTKAINTFAIPVITYSFGIIKWSHTDIENIQILIRTELTRHRMSHPNACKERLTIDRKQGGRGIIDIQSLRTKQIKTLRHFFQSKQTNLHRAIVKADKNYTPLTLSSPNHAADTHNPIELQQEKINTWSQKALHGKHRYRITQDHINEKQSYTWLQEGQLFPETEGFMLAIQDQVIATRNYKKYIIKDPSVANDNCRKCHQQKETIDHITSACKTLAGTEYTARHNSAAKIIHQALATTNKLIENTAPYYNYTPTSVLDNNQYKLYWDVEIHTDKTIPANRPDIVFQSKADKVTYLIDIAIPNDTNVQTAYAGKISKYTDLAIEVKRLWKQNKVVIVPLIMSVSGLTPNTFTPHLHQLGLDEKLHKIFQKSVILKTCNIVRSFLNSDQ

SEQ ID NO: 32275 - protein, 1207 aa, Callosobruchus maculatus
MDRVNFINNQRRPRVRRLNSPEPQTEKEQPIGDNPVADVLPVEPATTKAGKPRQRLQWTTEMNTSVMHCYYTATKLETISTGYRHELHRLFTAQYPHLSARVTEQRLIDQKRVITKNNRLTPQQLQAIKNLVADEINTVETNDSLVNESITETQHDHTLNDKTPNTNTTNTTGTHLEENPEHESIPDAPDTVCTNRPPTTTRNQNVTQTPSFTQSAEQVMNAQFNKWCGTNPALRDPLPRLIFNSNTQKILHTINTNIIPQFLTSGSNLEDIHTVIYAAAAATLIVNGQKLPKRSNNHTSKRSKPKWQMRIENKITTIRKELAHLAQYTNNNNRSKRIQTTIDILKSKSPQKSIPEITDTLKQKLAVYAARLRRYNESNDRKDANNLFQKSEKQFYKKITTDNQITAVELPSKQELTEFWGSLWSEPKTHNENAPWIRQEEEKHQHIVEQGNVILTPEEIAETIKHTHNWKCPGVDNIQNFWYKQFSSVYEVLTDQINKAILQPNRLPKFLTQGITYIKTKNADTKNPANYRPITCLPTLYKIITATICRRIEKHLTENSILTEEQKGCRKQSQGCKEQLIIDSVIMEQTRKKHRNLHTCFIDYKKAFDSVPHSWLTKTLQIYKINPGLRQFLTRTMETWRTNIHLQTEDGHIQTDELHIRRGIFQGDSLSSLWFCLCLNPLSNTLNSTNCGFTIRHQKANQHKINHLLYMDDLKLYAATEVQLRELLRITEACTSDIKMEFGMSKCKVLHINKGQWKNHPEQEVVTGQALDNMDKDETYKYLGINQNAKIDHTKIKSQLTQEFKDRLIRLLKTKLNSRNLTKAINTFAIPILTYSFGIIKWSHTDIENIHILIRTELTKHRMSHPKACKERLTIDRKQGGRGIIDIQSLHAKQIKSLRHFFHSKQTNLHKAIVKADKNYTPLALSCPDHAADAHNHTQAQQEKINTWSQKALHGKHRYRVSQDYINEKQSYTWLQDGQLFPETEGFMLAIQDQVIATRNYRKYIMKDPSISDDNCRKCHQQKETIEHITSGCKTLAGTEYTARHNSAAKVIHQALATTNKLIENTDPYYNYTPTSVLENNQFKLYWDIEIHTDKTIPANRPDIVFQSKTDKVTYLIDIAIPNDMNIQNTYAGKISKYTDLAIEIKRLWKQNKVVIVPLIMSVSGLTPNTFTPHLQQLGLDEKLHKTFQKSVILKTCSIVRSFLNSE

SEQ ID NO: 32276 - protein, 1207 aa, Callosobruchus maculatus
MDRVNFMNNQRRPRVRRLNSPEPQTQTEQPIEHNPAADVLPTQPATTKAGKPRQRLQWTTDQSVMRCYYTATKLETISTGYRHELHRLFTTQYPHLSTRVTEQRLIDQKRVITKNNRLTPQELQDIKNLVSNEMNIVQPNDSLTTEQIVETQNSDTQTSQTSNTAKTNNTSIHSQLGLEYDQALDTPDTTITNLPSTIIQIQNITRPFAVTQSVEQVMSTQYNKWCGTNPALRDPLPRLIFKNNTQQILHTVNANVIPQFIRDDSNLEDIHTVIYAAAATTLIVNGQKLSKRSKHQTSNRTKPKWQIRIENKISTIRKDLAHLAQYTINNNHPSRHIQRTINILKSKSPQQTIPEITDTLKQKLAVYAARLRRYNESNARKDANSLFQKSEKQFYQKITADNQITTIEPPSKQELTEFWGSLWSEPKTHNEDAPWIREEEEKHQHIAEQGDVILSKEEIVETVKHTHDWKCPGVDNVQNFWYKHFSSTYEVLTNQINKAIRQPDRLPKFLTQGITYIKPKNADTKNPANYRPITCLPTLYKIITATLCRRIEQHLTQNTILTEEQKGCRKQSQGCKEQLIIDSVSMEQTRKEHRNLHTCFIDYKKAFDSVPHSWLTKILQIYKINPGLRQFLAKTMKTWRTNIHLTTQDGHIQTEELHIRRGIFQGDSLSSLWFCLCLNPLSNALNNTNHGFNIRRQKVNQHRINHLLYMDDIKLYAATDVQLRELLRITEVYTSDVRMEFGMNKCKVLHINKGQWKNHPEQEIVTGQTLDNMDKEETYKYLGFNQSVKIDHTQIKAELRQVFRDCLIKLLKTKLNSRNLTKAINTFAIPILTYSFGIIKWSHTDIANIHILIRTELTKHRMSHPNACKERLTIGRTQGGRGITDIQSLRTRQIKTLRHFFQNKQTNLHRAIVKADKNYTPLNLSCPDHVADTHNPTQSQQEKISTWSQKPLHGKHRYRVTQDHINKKQSYTWLEDGQLFPETEGFMLAIQDQVIATRNYKKYIIKDPSITDDNCRKCQQQKETIDHITSGCKTLAGTEYTARHNSAAKVIHQALATTNKLIENTDPYYNYTPTSVLENDQYKLYWDVQIHTDKTIPANRPDIVFQSKLDKVTYLIDIAIPNDVNIQNTYAGKISKYTDLAMEIKRLWKQDKVTIVPLIMSVSGLTPNTFTPHLQQLGLDEKLHKTFQKSVILKTCNIVRCFLNSDQ

SEQ ID NO: 32277 - protein, 1259 aa, Callosobruchus maculatus
MGVTRESDIYIVPTRGNTMHRVTSKNNQRRPRVRRLNSPEPQTQIEQPIEHNPAADVLPAQPATTKAGKPRQRLQWTTEINKHVMRCYYIATKLETISTGYRHELHRLFLAQYPHLAERVTEQRLIDQKRVITKNNRLTPQELQAIKMVVSNEINTVHTNDSQSSNTTTTNTIHSEIDPEREHTPDIPDTTVLPNDSLATESTGQTIHTCDNQPPNTDITNNTNIHLEIDPEHDHTADTPETTSTNVPSTAAQSQNISLPPSITESAEQVMNIQYNKWCGTNPALRDPLPRLIFKNNTRQILNTINSNIIPHFLTNDSNLEDIHTVIYAAAATTIIVNGQKLPKRSKDHINKRPKPKWQIRIENKISTIRKDLAHLTQYTNNNNPSKRIQATINRLKSKSPQQTIPEISDTLKQKLAVYAARLRRYNESNERKDANNLFQKSEKQFYQKMTSNNQIIATEPPSRQELTEFWGSLWSEPKTHNENAPWIRQEEEKQQHIPEQGDVILTPQEIAETIRHTHNWKCPGVDNVQNFWYKQFSATYEMLTNQINKAILQPDRLPKFLTQGITYIKPKNADTKNPANYRPITCLPTLYKIITATIGKRIEQHLNQNNILTEEQKGCRKQSQGCKEQLIIDSVIMEQARKEHRNLHTCFIDYKKAFDSVPHSWLMKTLQIYKINTALRQFLSRTMETWQTNIHLKTQDGHIQTEELHIRRGIFQGDSLSSLWFCLCLNPLSNALNNTNYGFNIRHQKANQHRINHLLYMDDIKLYAATEVQLKELLRITEVCTSDVRMEFGMSKCKVLHIQKGQWKNHSEQETLAGQTLDNMDKDETYKYLGFNQSIKIDHSEVKAQLTQELRDRLVRLLKTKLNSKNLTKAINTFAIPVLTYSFGIVKWSHTDIENINILIRTELTKHRMAHPKACKERLTIDRKQGGRGIIDIQSLHTRQIKTLRDFFQSKQTNLHRSIVKADKNYTPLTLSSPDHSADTHNHMESQQQKINTWSQKALHGKHRYRVTQEHINEKQSYTWLQDGQLFPETEGFMLAIQDQVIATRNYMKYIMKDTSITDDNCRKCHQQKETIDHITSSCKTLAGTEYTARHNSAAKVIHQALATTNKLIENTDPYYNYTPTSVLENNEYKLYWDVEIHIDKTIPANRPDIVFQSKADRVTYLIDIAIPNDTNVQNAYAGKISKYTDLAIEIKRLWKQNKVTIVPLIMSVSGLTPNTFTPHLRQLGLDERLHKIFQKSVILKTCNIVRSFLNSDP

SEQ ID NO: 32278 - protein, 875 aa, Callosobruchus maculatus
MEQQPGVSEPGLHFFVLNITISEIYDTLKQKLAVYAARLRRYNESNDRKDTNNLFQKSERQFYQKITSNNQITTIEPPSRKELTDFWGSLWSEPKTHNENAPWIRQEEEKQQHIPEQGDVILTPQEIAETRKHTHNWKCPGVDNVQNFWYKQFSATYEMLTDQINKAILQPNRLPKFLTQGVTYIKPKNADTKNPANYRPITCLPTLYKIITATIGKRIEQHLTQNNILTEEQKGCRKQSRGCKEQLIIDSVIMEQTRKEHRNLHTCFIDYKKAFDSVPHSWLTKTLQIYKINPTLRQFLTRIMETWRTNIHLKTQDGHIRTEELYIRRGIFQGDSLSSLWFCLCLNPLSNALNNTNYGFNIRHQKVNQHRISHLLYMDDIKLYAATEVQLKELLKITEVCTSDVRMEFGMSKCKVLHIHKGQWKNHSEQEILTGETLDNMEKDETYKYLGFNQNIKIDHSEVKAQLTQEFRDRLITVLKTKLNSKNLTKAINTFAIPVLTYSFGIIKWSHTDIENINILIRTELTKHRMSHPKACKERLTIDRKHGGRGIIDIQSLHTRQIKTLRDFFQSKETNLHRSIVKADKNYTPLTLSRPDHPADAHNHIELQQEKINTWSQKALHGKHRYRVTQDHINERQSYTWLQDGQLFPETEGFMLAIQDQVIATRNYMKYIIKDTSITDDNCRKCHQQKETIDHITSACKTLAGTEYTARHNSAAKVIHQALATTNKLIENTDPYYNYTPTSVLENNEYKLYWDVEIHTDKTIPANRPDIVFQSKADKVTYLIDIAIPNDTNIQNAYAGKISKYTDLAIEIKRLWKQNKVTIVPLIMSVSGLTPNTFTPHLQQLGLDERLHKIFQKSVILKTCNIVRSFLNSDP

SEQ ID NO: 32279 - protein, 1208 aa, Callosobruchus maculatus
MDKVSFSNNQRRPRVRRLNSPEPQNQTQQSTAHNPTADVLPVQPATTKAGKPRQRLQWTTEMNKSVMHCYYTATKLETISTGYRHELYRLFTAQYPHLSTRVTEQRLIDQKRVITKNNRLTPQELQAIKSLVSNEINTVTPNDSLADESITERQNNHTRSNQTPNTDTTNNTSIHLDVDSEHEHTPDTPDQTSINLPSTATQSQDVTPPPCITQSTEQVMNTQYNKWCGTNPTLRDPLPRLIFKNNTRKILQTVNSNIIPQFLTKDSNLEDIHTVIYAAAATTLIVNGQKLPKRSKDHTSKRSKPKWQIRIENKISTIRKDLAHVTQYIHKNNLSKRIQTTINRLKSRSPQQTISEIYDTLKQKLAVYAARLRRYNDSNDRKDTNNLFQKSERQFYQKITSNNQITTIEPPSRKELTDFWGSLWSEPKTRNENAPWIRQEEEKQQHIPEQGDVILTPQEIAETIKHTHNWKCPGVDNVQNFWYKQFSATYEMLTDQINKAILQPNRLPKFLTQGVTYIKPKNADTKNPANYRPITCLPTLYKIITATIGKRIGQHLTQNNILTEEQKGCRKQSQGCKEQLIIDSVIMKQTRKEHRNLHTCFIDYKKAFDSVPHSWLTKTLQIYKINPTLRQFLTRTMETWRTNIHLKTQDGHIQTEELCIRRGIFQGDSLSSLWFCLCLNPLSNALNNTNYGFNIRHQKVNQHRINHLLYMDDIKLYAATEVQLKELLKITEVCTSDVRMEFGMSKCKVLHIHKGQWKNHSEQEILTGQTLDNMEKDETYKYLGFNQNIKIDHSEVKAQLTQEFRDRLITLLKTKLNSKNLTKAINTFAIPVLTYSFGIIKWSHTDIENINILIRTELTKHRMSHPKACKERLTIDRKHGGRGIIDIQSLHTRQIKTLRDFFQSKETNLHRSIVKADKNYTPLTLSRPDHPADAHNHIELQQEKINTWSQKALHGKHRYRVTQDHINERQSYTWLQDGQLFPETEGFMLAIQDQVIATRNYMKYIIKDTSITDDNCRKCHQQKKTIDHITSACKTLAGTEYTARHNSAAKVIHQALATTSKLIENTDPYYNYTPTSVLENNEYKLYWDVEIHTDKTIPANRPDIVFQSKADKVTYLIDIAIPNDTNIQNGYAGKISKYTDLAIEIKRLWKQNKVTIVPLIMSVSGLTPNTFTPHLKQLGLDERLHKIFQKSVILKTCNIVRSFLNSDP

SEQ ID NO: 32280 - protein, 982 aa, Callosobruchus maculatus
MVWHQSYIARSLPRLIFKNNTLQILHTINVNIIPQFLTKDSNLEDIHTVIYAAAATTVTLNGQKLPKRSIARTTERSKPKWQIRIENKISTIRKDLAHLAQYTNNNNSSKRVQTTINILKSKSPQQTIPEIADTLKQKLAVYAARLRRYNESNARKDANNLFQKSEKQFYQKITADNQITAIEPPSKQELTEFWGSLWSAPKTHNKNAPWIRQEEEKHQHIVEQGDVTLTPEEIAETIKHTHNWKCPGVDNVQNFWYKQFSATYEMLTDQINKAILQPNRLPKFLTQGITYIKPKNADTKNPANYRPITCLPTLYKIITATIGRRIEQHLTQNNILTEEQKGCRKQSQGCKEQLIIDNVIMEQTRKEHRNLHTCFIDYKKAFDSVPHSWLAKTLQIYKINPGLREFLTRTMETWRTSIHLKTQDSLIKTDELHIRRGIFQGDSLSSLWFCLCLNPLSNALNNTNCGFNIRHDRLNQHKINHLLYMDDIKLYAANEVQLKELIRTTEACSSDVRMEFGMSKCKVLHINRGHWKDHPQQETVAGQTLNNINKDETYKYLGFNQNVKIDHTQVKAQLTQEFRDRLIKLLKTKLNSRNLTKAINTFAIPVLTYSFGIIKWSHTDIENIHILIRTELTKHRMSHPNACKERLTIDRKQGGRGITDIQLLRTRQIKTLRHFFQNKQTNLHRAIVKADKNYTPLNLSCPDHVADTHNPTQSQQEKISTWSQKPLHGKHRYRITQDHINEKQSYTWLQDGQLFPETEGFMLAIQDQVVATRNYKKYVIKDPSITNDNCRKCQQQKETIDHITSACKTLAGTEYTARHNSAAKIIHQALATKNKLIENSDPYYKYTPTSVLENDHYKLYWDVEIHTDKTINANRPDIVFQIKADKVTYLIDIAIPNDVNVQNTYAGKISKYTDLAIEMKRIWKQDKVIIVPLIMSVSGLTPNTFTQHLQQLGLDESLHKIFQKSVILKTCNIVRSFLNSDQ

SEQ ID NO: 32281 - protein, 979 aa, Callosobruchus maculatus
MNTQYNKWCGTNPTLRDPLPRLIFKNNTLQILHTINDNIIPQFLTKDSDLEDIHTVIYAAAATTLTLNGQKLPERSIARTTERSKPKWQIRIENKISTIRKDLAHLAQYTNNNNRSKRVQTTINILKSKSPQQTIPEIADTLKQKLAVYAARLRRYNESNARKDANNLFQKSEKQFYQKITADNQITAIEPPSKQELTEFWGSLWSEPKTHNENAPWIRQEEEKHQHIVEQRDVILTPEEIAETIKHTHNWKCPGVDNVQNFWYKQFSATYEMLTDQINKAILQPNRLPKFLTQGITYIKPKNADTKNPANYRPITCLPTLYKIITATTCRRIEQHLTQNNVLTEEQKGCRKQSQGCKEQLIIDSVIMEQTRKEHRNLHTCFIDYKKAFDSVPHSWLAKTLQIYKINPGLRQLLTRTMETWRTNIHLKTQDGYIKTDELHIRSGIFQGDSLSALWFCLCLNPLSNALNNTNCGFNVRHERLNQHKINHLLYMDDIKLYAANKVQLRELIRITEVCSSDVKMEFGMSKCKVLHINKGQWKDHPEQETVTGQTLNNMDKDETYKYLGFNQNVKIDHTKVKAQLTQEFRDRLIKLLKTKLNSRNLTKAINTFAIPVLTYSFGIIKWSHTDIENIHILIRTELTKHRMSHPNACKERLTIDRKQGGRGIIDIQSLRTRQIKILRHFFQNKQTNLHRAIVKADKNYTPLNLSCPDHAADTHNPTQSQQEKINTWSQKPLHGKHRYRITQDHINEKQSYTWLQDGQLFPETEGFMLAIQDQVIATRNYKKYIIKDPSITEDNCRKCHQQKETIDHITSGCKTLAGTEYTARHNSAAKIIHQALATVNKMIDNTDPYYNYTPTSVLENDRYKLYWDVEIHTDKTIPANRPDIVFQSKADKVTYLIDIAIPNDTNVQTTYAGKISKYTDLAIEVKRLWKQDKVVIVPLIMSVSGLTPNTFTPHLHQLGLDEKLHKTFQKSVILKTCK

SEQ ID NO: 32282 - protein, 1208 aa, Callosobruchus maculatus
MDKVSFSNNQRRPRVRRLNSPEPQNQIQQPTAHNPTADVLPVQPATTKAGKPRQRLQWTTEMNKSVMHCYYTATKLETISTGYRHELYRPFTAQYPHLSTRVTEQRLTDQKRVITKNNRLTPQELQAIKSLVSNEINTVTPNDSLADESITERQNNHTRSNQTPNTDTTHNTSIHLDVDSEHEHTPDTPNQTSINLPSTATQSQNVTPPPYITQSTEQVMNTQYNKWCGTNPTLRDPLPRLIFKNNTRQILQTVNSNIIPQFLTKDSNLEDIHTVIYAAAATTLIVNGQKLPKRSKDHTSRRSKPKWQIRIENKISTIRKDLAHVTQYIHKNNLSKRIQTTINRLKSRSPQQTISEIYDTLKQKLAVYAARLRRYNESNDRKDTNNLFQKSERQFYQKITSSNQITIIEPPSRKELTDFWGSLWSEPKTHNENAPWIRQEEEKQQHIPEQGDVILTPQEIAETIKHTHNWKCPGVDNVQNFWYKQFSTTYEILTDQINKAILQPNRLPKFLTQGVTYIKPKNADTKNPANYRPITCLPTLYKIITATIGKRIEQHLTQNNILTEEQKGCRKQSQGCKEQLIIDSVIMEQTRKEHRNLHTCFIDYKKAFDSVPHSWLTKTLQIYKINPTLRQFLTRTMETWRTNIHLKTQDGHIQTEELCIRRGIFQGDSLSSLWFCLCLNPLSNALNNTNYGFNIRHQKVNQHRISHLLYMDDIKLYAATEVQLKELLKITEVCTSDVRMEFGMSKCKVLHIHKGQWKNHSEQEILTGQTLDNMEKDETYKYLGFNQNIKIDHSEVKAQLTQEFRDRLITLLKTKLNSKNLTKAINTFAIPVLTYSFGIIKWSHTDIENINILIRTELTKHRMSHPKACKERLTIDRKHGGRGIIDIQSLHTRQIKTLRDFFQSKETTLHRSIVKADKNYTPLTLSRPDHPADAHNHIELQQEKINTWSQKALHGKHRYRVTQDHINERQSYTWLQDGQLFPETEGFMLAIQDQVIATRNYMKYIIKDTSITDDNCRKCHQQKETIDHITSACKTLAGTEYTARHNSAAKVIHQALATTNKLIENTDPYYNYTPTSVLENNEYKLYWDVEIHTDKTIPANRPDIVFQSKADKVTYLIDIAIPNDTNIQNAYAGKISKYTDLAIEIKRLWKQNKVTIVPLIMSVSGLTPNTFTPHLQQLGLDERLHKIFQKSVILKTCNIVRSFLNSDP

SEQ ID NO: 32283 - protein, 1245 aa, Callosobruchus maculatus
MHKVTSKNNQRRPRVRRLNSPEPQTHTEQPREHNPAADVLPAQPATTKAGKPRQRLQWTTEINKHVMHCYYTATKLETISTGYRHELHRLFIAQYPHLAERVTEQRLIDQKRVITKNNRLTPEELQAIKILVSNEINTAHPNHTQTSNKTTIDSTSTHSETDPEHEHTQHVPDTAVQPNDSLATELTTERHAIRTRNNQPPDTGTTNNTSTHLELDVENDHIPDTPETTRTNLPATTTQSQNVTIPPAITQSAEQVMNTQYNKWCGTNPTLRDPLPRLIFKNNTLQILNTINVNIIPQFLTKDSDLEDIHTVIYAAAATTLTLNGQKIPKRSIARTTERSKPKWQIRIENKISTIRKDLAHLAQYTNNNNRSKRIQTTINILKSKSPQQTISEIADTLKQKLAVYAARLRRYNESNARKDANNLFQKSEKQFYQKITADNQITAIEPPSKQELTEFWGSLWSEPKTHNENAPWIRQEEEKHQHIVEQGDVILTPEEIAETIKHTHNWKCPGVDNVQNFWYKQFSATYEILTDQINKAILQPNRLPKFLTQGITHIKPKNADTKNPANYRPITCLPTLYKIITATICRRIEQHLTQNNILTEVQKGCRKHSQGCNEQLIIDSVIMEQTRKEHRNLHTCFIDYKKAFDSVPHSWLAKTLQIYKINPGLRQFLTRTMETWRTNIHLKTQDGHIKTDELHIRRGIFQGDSLSSLWFCLCLNPLSNALKNTNCGFNIRHERLNQHKINHLLYMDDIKLYAANEVQLRELIRITEVCSSDVRMEFGMSKCKVLHINKGQWKDHPEQETVTGQTLNNMNKGETYKYLGFNQNVKIDHTKVKAQLTQEFRDRLIKLLKTKLNSRNLTKAINTFAIPVLTYSFGIIKWSHTDIENIHILIRTELTKHRMSHPNACKERLTIDRKQGGRGIVDIQSLRTRQIKTLRHFFQNKQTNLHRAIVKADRNYTPLNLSCPDHAADTNNPTQSQQEKINTWSQKPLHGKHRYRITQDHINEKQSYTWLQDGQLFPETEGFMLAIQDQVIATRNYKKYIIKDPSITEDSCRKCHQQKETIDHITSGCKVLAGTEYTARHNSAAKIIHQALATANKLIENTDPYYNYTPTSVLENDRYKLYWDVEIHTDKTIPANRPDIVFQSKADKITYLIDIAIPNDVNVQNTYAGKISKYTDLAMEIKRLWKQNKVTIVPLIMSVSGLTPNTFTQHLQQLGLDEKLHKVFQKSVILKTCNIVRSFLNSDQ

SEQ ID NO: 32284 - protein, 1102 aa, Callosobruchus maculatus
MPVDGSSEALIPPRNYADNAMDKVSFSNNQRRPRVRRLNSPEPQNQTPQPIAHNPTADVLPVQPATTKAGKPRQRLQWTTEINKSVMHCYYTATKLETISTGYRHELHRLFTAQYPHLSTRVTEQRLIDQKRVITKNNRLTPQELQAIKSLVSNEINTAPPNDSLADESTTERQNIHSRNSQTPNTDTTNDTSIHSDMDSEHEHIPDTPDQTSINLPLTATQSQKVTPPPSITQSTEQVMDTQYNKWCGTNPALRDPLPRLIFKNNTQQILHTINSNITPQFLTNVSNLEDIHTVIYAAAATTLTVNGQKLPKRSKDHTSNRPKPKWQIRIENKISAIRKDLAHLAQYTNNNNRSKRIQTTIDILKSKSPQKSIPEIADTLKQKLAVYAARLRRYNESNERKNANNLFQKSEKQFYQKITANNQEATIEPPSRQDLTEFWSSLWSEPKTHNQDAPWIRQEEEKHQHIMEQGDVILTPEEITETIKHTHNWKCPGVDNIQNFWYKQFSSTYEVLTDQINKAILQPNRLPKFLTQGITYIKPKNTDTKNPANYRPITCLPTLYKIITATICRRIEQHLTQYNILTEEQKGCRKQSQGCKEQLIVDSVIMEQTRKEHRNLHTCFIDYKKAFDSVPHSWLKKTLQIYKINSGLRQFLRRIMETWRTNIHLKTQHGHIQTDELHIRRGIFQGDSLSSLWFCLCLNPLSNALINTNCGFNIRHEKVNQHKINHLLYMDDIKLYAATEVQLRELLRITEVCTSDVRMEFGMSKCKVLHINKGQWKSHQERETLTGQTLDNMDKGETYKYLGFNQSVKIDHSQVKEQLIQEFRDRLIKLLKTKLNSRNLTKAINTFAIPVITYSFGIIKWSHTDIENIQILIRTELTRHRMSHPNACKERLTIDRKQGGRGIIDIQSLRTKQIKTLRHFFQSKQTNLHRAIVKADKNYTPLTLSSPNHAADTHNPIELQQEKINTWSQKALHGKHRYRITQDHINEKQSYTWLQDGQLFPETEGFMLAIQDQVIATMNYKKYIIKDPSVTNDNCRKCHQQKETIDHITSACKTLAGTEYTARHNSAAKIIHKALATTNKLIENTAPYYNYTPTSVLDNNQ

SEQ ID NO: 32285 - protein, 1139 aa, Callosobruchus maculatus
MHKVTSKNNQRRPRVRQLNSPEPETQTEQPRDHNPAADVLPAQPATTKAGKPRQRLQWTTEINKHVMHCYYTATRLETISTGYRHELHRLFIAQYPHLAERVTEQRLIDQKRVITKNNRLTPEELQAIKILVSSEINAHPNHPQTSNKTTIDNSSIHSETKPEHEHTQHIPDTAAQPNDSLATESITERHAIRTRNNQPPNTGTINNTSIHLELDLEDDHTPDTPETACTNLPSTATQSQNITLPPAITQSAEHVMNTQYNKWCGTNPTLRDPLPRLIFKNNTLQILHTINDNIIPQFLTKDSDLEDIHTVIYAAAATTLTLNGQKLPKRSIARTTERSKPKWQIRIENKISTIRKDLAHLAQYTNNNNRSKRVQTTINILKSKSPQQTIPEIADTLKQKLAVYAARLRRYNESNARKDANNLFQKSEKQFYQKITADNQITAIEPPSKQELTEFWGSLWSEPKTHNENAPWIRQEEEKHQHIVEQRDVILTPEEIAETIKHTHNWKCPGVDNVQNFWYKQFSATYEMLTDQINKAILQPNRLPKFLTQGITYIKPKNADTKNPANYRPITCLPTLYKIITATICRRIEQHLTQNNILTEEQKGCRKQSQGCKEQLIIDSVIMEQTRKEHRNLHTCFIDYKKAFDSVPHSWLAKTLQIYKINPGLRQFLTRTMETWRTNIHLKTQDGYIKTDELHIRRGIFQGDSLSALWFCLCLNPLSNALNNTNCGFNVRHERLNQHKINHLLYMDDIKLYAANKVQLRELIRITEVCSSDVKMEFGMSKCKVLHINKGQWKDHPEQETVTGQTLNNMDKDETYKYLGFNQNVKIDHTKVKAQLTQEFRDRLIKLLKTKLNSRNLTKANNTFAIPVLTYSFGIIKWSHTDTENIHILIRTELTKHRMSHPNACKERLTIDRKQGGRGIIDIQSLRTRQIKILRHFFQNKQTNLHRAIVKADKNYTPLNLSCPDHAADTHNPTQSQQEKINTWSQKPLHGKHRYRITQDHINEKQSYTWLQDGQLFPETEGFMLAIQDQVIATRNYKKYIIKDPSITEDNCRKCHQQKETIDHITSGCKTLAGTEYTARHNSAAKIIHQALATVNKMIGNTDPYYNYTPTSVLENDRYKLYWDVEIHTDKTIQPIDQI

SEQ ID NO: 32286 - protein, 1198 aa, Callosobruchus maculatus
MATTKAGKPRQRLQWTTEINKSVMHCYYTATKLETISTGYRHELRRLFIAQYPHLAERVTEQRLIDQKRVITKNNRLTPEELQAIKVLVSSEMNTAYPNDPQTSNTTTTDNTSIHLEIDPEHEHTQDIPDTAVQPNDSSAIETITEGHAIHSRNNQPPNKDTTNNTSIHLEIDPEHDHTPETTCTNLPSTTTQNQNITIPAVITQSAEQVMYTQYNKWCGTNPVLRDPLPRLIFKNNTRQILHTINANIIPQFLTNDSDLEDIHTVIYAAAATTLIVNGQKLPKRSKNHTNKRSKPRWQIRIENKISTLRKDLAHLTQYTNNNNLSKRIQTTIHRLKSKSPQQTIPEIAHTLKQKLAVYAARLRRYNESNDRKDANNLFQKSEKQFYQKITSTTQITTIEPPTRQELTEFWGNLWSEPKTHNDNAPWIRQEEEKQQHIPEQGDVILTPQEIAETIKHTHNWKCPGVDNVQNFWYKQFTATYELLTNQINKALLQPNRLPKFLTQGITYLKPKNADTKNPANYRPITCLPTLYKIITATIGKRIEQHLTQNSILTEEQKGCRKQSQGCKEQLIIDSVIMEQTRKEHRNLHTCFIDYKKAFDSVPHSWLNKTLEIYKINPGLRQFLTTTMETWRTNIYLQTEDGHIQTDELHIRRGIFQGDSLSSIWFCLCLNPLSNTLNDTNCGFTIRHQKVNLHKINHLLYMDDIKLYAATEVQLRDLLRITEVCTSDMRMEFGMSKCKVLHINKGQWKNHPQQEVVTGQTLDNMDKDETYKYLGFNQNVKIDHTQVKAQLTREFKDRLTRLLKTKLNSRNITKAINTFAIPVLTYSFGIIKWSHTDIENIHILIRTEFTKHRMSHPNACKERLNIDRKQGGRGIIDIHSLHTKQIKTLRYFFHSKQTNLHKAIVKADKNYTPLALSCPDHAADAHDHIQSQQEKINTWSQKALHGKHRYRVTQDHINKNQSYTWLQDGQLFPETEGFMLAIQDQVIATRNYKKYIIKDPSITDDSCRKCHQQKETIEHITSGCKTLAGTEYTARHNSAAKVIHQALATTNKLTENTDPYYNYTPTSVLENNKFKLYWDIEIHTDKTIPANRPDIVFQSKADKVTYLIDIAIPNDMNIQSTYTGKISKYTDLAIEIKRLWKQDKVIIVPLIMSVSGLTPNTFAPHLQQLGLDEKLHKTFQKSVILKTCSIVRSFLNSE

SEQ ID NO: 32287 - protein, 989 aa, Callosobruchus maculatus
MNTQYNKWCGTNPTLRDPLPRLIFRNNTRQILQTVNSNIIPQFLTKDSNLEDIHTVIYAAAATTLIVNGQKLPKRSKDHTSKRSKPKWQIRIENKISTIRKDLAHVTQYIHKNNLSKRIQTTISRLKSRSPQQTISEIYDTLKQKLAVYAARLRRYNESNDRKDTNNLFQKSERQFYQKITSNNQITTIEPPSRKELTDFWGSLWSEPKIHNENAPWIRQEEEKQQHIPEQGNVILTPQEIAETVKHTHNWKCPGVDNVQNFWYKQFSATYEMLTDQINKAILQPNRLPKFLTQGVTYIKPKNADTKNPANYRPITCLPTLYKIITATIGKRIEQHLTQNNILTEEQKGCRKHSQGCKEQLIIDSVIMEQTRKEHRNLHTCFIDYKKAFDSVPHSWLTKTLQIYKINPTLRQFLTRIMETWRTNIHLKTQDGHIQTEELYIRRGIFQGDSLSSLWFCLCLNPLSNALNNTNYGFNIRHQKVNQHRISHLLYMDDIKLYAATEVQLKELLKITEVCTSDVRMEFGMSKCKVLHIHKGQWKNHSEQEILTGETLDNMEKDETYKYLGFNQNIKIDHSEVKAQLTQEFRDRLITLLKTKLNSKNLTKAINTFAIPVLTYSFGIIKWSHTDIENINILIRTELTKHRMSHPKACKERLTIDRKHGGRGIIDIQSLHRRQIKTLRDFFQSKETNLHRSIVKADKNYTPLTLSRPDHPADAHNHIELQQEKINTWSQKALHGKHRYRVTQDHINERQSYTWLQDGQLFPETEGFMLAIQDQVIATRNYMKYIIKDTSITDDNCRKCHQQKETIDHITSACKTLAGTEYTARHNSAAKVIHQALATTNKLIENTDPYYNYTPTSVLENNEYKLYWDVEIHTDKTIPANRPDIVFQLKADRVTYLIDIAIPNDTNIQNAYAGKISKYTDLAIEIKRLWKQNKVTIVPLIMSVSGLTPNTFTPHLQQLGLDERLQKIFQKSVILKTCNIVRSFLNSDP

SEQ ID NO: 32288 - protein, 1209 aa, Callosobruchus maculatus
MDRVNFMNNQRRPRVRRLNSPEPQTQTEQPIEHNPAADVLPTQPATTKAGKPRQRLQWTTELNKSVMRCYYTATKLETISTGYRHELHRLFTTQYPHLSTRVTEQRLIDQKRVITKNNRLTPQELQDIKNLVSNEMNIVQPNDSLTTEQIVETQNSDTQTSQTSNTAKTNNTSIHSELGPEHDHALDTPDTTITNPPSTIIQIQNITRPFAVTQSVEQVMSTQYNKWCGTNPALRDPLPRLIFKSNTQQILHTVNANVIPQFIRDDSNLEDIHTVIYAAAATTLIVNGQKLSKRSKHQTSNRTKPKWQRRIENKISTIRKDLAHLAQYTINNNHPSRHIQRTINILKSKSPQQTIPEITDTLKQKLAVYAARLRRYNESNARKDANSLFQKSEKQFYQKITADNQITTIEPPSKQELTEFWGSLWSEPKTHNEDAPWIREEEEKHQHIAEQGDVILSKEEIVETIKHTHDWKCPGVDNVQNFWYKHFSSTYEVLTNQINKAIRQPDRLPKFLTQGITYIKPKNADTKNPANYRPITCLPTLYKIITATLCRRIEQHLTQNNILTEEQKGCRKQSQGCKEQLIIDSVIMEQTRKEHRNLHTCFIDYKKAFDSVPHSWLTKILQIYKINPGLRQFLAKTMKTWRTNIHLTTQDGHIQTEELHIRRGIFQGDSLSSLWFCLCLNPLSNALNNTDYGFNIRHQKVNQHRINHLLYMDDIKLYAATDVQLRELLRITEVYTSDVRMEFGMNKCKVLHINKGQWKNHPEQEIVTGQTLDNMDKEETYKYLGFNQSVKIDHTQIKAELRQVFRDRLIKLLKTKLNSRNLTKAINTFAIPILTYSFGIIKWSHTDIENIHILIRTELTKHRMSHPNACKERLTIDRTQGGRGITDIQSLRTRQIKTLRHFFQNKQTNLHRAIVKADKNYTPLNLSCPDHVADTHNPTQSQQEKISTWSQKPLHGKHRYRVTQDHINRKQSYTWLQDGQLFPETEGFMLAIQDQVIATRNYKKYIIKDPSITDDNCRKCQQQKETIDHITSGCKTLAGTEYTARHNSAAKVIHQALATTNKLIENTDPYYNYTPTSVLENDQYKLYWDVQIHTDKTIPANRPDIVFQSKLDKVTYLIDIAIPNDVNIQNTYAGKISKYTDLAMEIKRLWKQDKVTIVPLIMSVSGLTPNTFTPHLQQLGLDEKLHKTFQKSVILKTCNIVRSFLNSDQ

SEQ ID NO: 32289 - protein, 989 aa, Callosobruchus maculatus
MNTQYNKWCGTNPVLRDPLPRLIFKNNTRQILHTINANIIPQFLTNDSDLEDIHTVIYAAAATTLIVNGQKLPKRSKNHTSKRSKPKWQIRIENKISTLRKDLAHVTQYTNNNNLSKRIQTTINRLKSKSPQQTIPEIADTLKQKLAVYAARLRRYNESNDRKDANNLFQKCEKQFYQKMTSNNQITTTEPPSRQELTEFWGSLWSEPKTHNENAPWIRQEEEKHQHIAEQGDVVFTPDEIAETIKHTHNWKCPGVDNVQNFWYKQFSTTYEMLTEQINKAILQPNRLPKFLTQGITYIKPKNGDTRNPANYRPITCLPTLYKIITATIGKRIEQHLTQNNILTEEQKGCRKQSQGCKEQLIIDSVIMEQTRKEHRNLHTCFIDYKKAFDSVPHSWLTKTLQIYQINPVLRQFLTRIMETWRTNIHLKTQDGHIQTEELLIRRGIFQGDSLSSLWFCLCLNPLSNALNNTNYGFNIRHQKVNQHRINHLLYMDDIKLYAATEVQLKELLRITEVCTSDVRMEFGMSKCKVLHINKGQWKNQSEQEILTGETLDNMDKDETYKYLGFNQNIKIDHTQAKAQLTQELRNRLLKLLKSKLNSKNLTKAINTFAIPVLTYSFGIIKWSHTDIENIHILIRTELTKHRMSHPNACKERLTIDRKQGGRGIIDIQSLHTRQIKTLRDFFQSKQTNLHRSIVKADKNYTPLNLSRSDHSADGHNHIELQQEKINTWSQKALHGKHRYRVTQEHINERQSYTWLQDGQLFPETEGFMLAIQDQVIATRNYMKYIIKDTSITDDNCRKCHQQKETIDHITSGCKTLAGTEYTARHNSAAKVIHQALATTNKLIENTDPYYNYTPTSVLENNEYKLYWDVEIHTDKTIPANRPDIVFQSKADKVTYLIDIAIPNDTNIQNAYAGKISKYTDLAIEIKRLWKQNKVTIVPLIMSVSGLTPNTFTPHLQQLGLDEKLHKIFQKSVILKTCNIVRSFLNSDP

SEQ ID NO: 32290 - protein, 988 aa, Callosobruchus maculatus
MNAQFNKWCGTNPALRDPLPRLIFNSNTQKILHTINTNVIPQFLTSGSNLEDIHTVIYAAAAATLIVNGQKLPKRSNNHTSKRSKPKWQMRIENKITTIRKELAHLAQYTNNNNRSKRIQTTIDILKSKSPQKSIPEITDTLKQKLAVYAARLRRYNESNDRKDANNLFQKGEKQFYKKITTDNQITATELPSKQELTEFWGSLWSEPKTHNENAPWIRQEEEKHQHIAEQGNVILTPEEIAETIKHTHNWKCPGVDNIQNFWYKQFSSVYEVLTDQINKAILQPNRLPKFLTQGITYIKPKNADTKNPANYRPITCRPTLYKIITATICRRIEKHLTENSILTEEQKGCRKQSQGCKEQLIIDSVIMEQTRKEHRNLHTCFIDYKKAFDSVPHSWLTKTLQIYKINPGLRQFLTRTMETWRTNIHLQTEDGHIQTDELHIRRGIFQGDSLSSLWFCLCLNPLSNTLNSTNCGFTIRHQKANQHKINDLLYMDDLKLYAATEVQLRELLRITEVCTSDIKMEFGMSKCKVLHINKGQWKNHPEQEVVTGQALDNMDKDETYKYLGINQNAKIDHTKIKSQLTQEFKDRLIRLLKTKLNSRNLTKAINTFAIPILTYSFGIIKWSHTDIENIHILIRTELTKHRMSHPKACKERLTIDRKQGGRGIIDIESLHAKQIKSLRHFFHSKQTNLHKAIVKADKNYTPLALSCPDHAADAHNHIQAQQEKINTWSQKALHGKHRYRVTQDHINEKQSYTWLQDGQLFPETEGFMLAIQDQVIATRNYKKYIMKDPSISDDNCRKCHQQKETIEHITSGCKTLAGTEYTARHNSAAKVIHQALATTNKLIENTDPYYNYTPTSVLENNQFKLYWDIEIHTDKTIPANRPDIVFQSKTDKVTYLIDIAIPNDMNIQNTYAGKISKYTDLAIEIKRLWKQNKVVIVPLIMSVSGLTPNTFTPHLQQLGLDEKLHKTFQKSVILKTCSIVRSFLNSE

SEQ ID NO: 32291 - protein, 989 aa, Callosobruchus maculatus
MNTQYNKWCGTNPTLRDPLPRLIFKNNTRQILQTVNSNIIPQFLTKDSNLEDIHTVIYAAAATTLIVNGQKLPKRSKDHTSKRSKPKWQIRIENKISTIRKDLAHVSQYIHKNNLSKRIQTTINRLKSRSPQQTISEIYDTLKQKLAVYAARLRRYNESNDRKDTNNLFQKSERQFYQKITSNNQITTIEPPSRKELTDFWGSLWSEPKTHNENAPWIRQEEEKQQHIPEQGDVILTPQEIAETIKHTHNWKCPGVDNVQNFWYKQFSTTYEILTDQINKAILQPNRLPKFLTQGVTYIKPKNADTKNPANYRPITCLPTLYKIITATIGKRIEQHLTQNNILTEEQKGCRKQSQGCKEQLIIDSVIMEQTRKEHRNLHTCFIDYKKAFDSVPHSWLTKTLQIYKINPTLRQFLTRTMETWRTNIHLKTQNGHIQTEELCIRRGIFQGDSLSSLWFCLCLNPLSNALNNTNYGFNIRHQKVNQHRISHLLYMDDIKLYAATEVQLKELLKITEVCTSDVRMEFGMSKCKVLHIHKGQWKNHSEQEILTGQTLDNMEKDETYKYLGFNQNIKIDHSEVKAQLTQEFRDRLITLLKTKLNSKNLTKAINTFAIPVLTYSFGIIKWSHTDIENINILIRTELTKHRMSHPKACKERLTIDRKHGGRGIIDIQSLHTRQIKTLRDFFQSKETNLHRSIVKADKHYTPLTLSRPDHPADAHNHIELQQEKINTWSQKALHGKHRYRVTQDHINERQSYTWLQDGQLFPETEGFMLAIQDQVIATRNYMKYIIKDTSITDDNCRKCHQQKETIDHITSACKTLAGTEYTARHNSAAKVIHQALATTNKLIENTDPYYNYTPTSVLENNEYKLYWDVEIHTDKTIPANRPDIVFQSKADKVTYLIDIAIPNDTNIQNAYAGKISKYTDLAIEIKRLWKQNKVTIVPLIMSVSGLTPNTFTPHLKQLGLDERLHKIFQKSVILKTCNIVRSFLNSDP

SEQ ID NO: 32292 - protein, 1245 aa, Callosobruchus maculatus
MHRVNSKNNQRRPRVRRLNSPEPQTQTEQPIERNPAADVLPAQPATTKAGKPRQRLQWTTEINKSVMHCYYTATKLETISTGYRHELHRLFIAQYPHLAERVTEQRLIDQKRVITKNNRLTPEELQAIKILVSNELNTPNQNDPQTSNTATSNNTTIATEIDPAHEHTQDRPDNAVQPNDSLAIESITEGHTIHTRNNQRPNKDTTNNTSIHFEIDPEHNHAPHTPETTCTNLPSTATQSQNITLPPAITQSAKQVMNTQYNKWCGTNPVLRDSLPRLIFKNNTRQILHTINTNIIPQFLTNDSDLEDIHTVIYAAAATTLIVNGQKLPQRSKTYSSKRSKPKWQIRLENKISTLRKDLAHLTQYTNNNNLSKRIQTTINRLKSKSPQQTISEIADTLKQKLAVYAARLRRYNESNDRKDTNNLFQKSEKQFYQKMTSNNQITTTEPPSRQELTEFWGSLWSEPKTHNENAAWIRQEEEKHQHIAEQGDIVLTPEEIAETIKHTHNWKCPGVDNVQNFWYKQFSATYEMLTEQINKAILQPNRLPKFLTQGITYIKPKNADTRNPANYRPITCLPTLYKIITATIGKRIEQHLTQNNILTEEQKGCRKQSQGCKEQLIIDCVIMEQTRKEHRNLHTCFIDYKKAFDSVPHSWLKKTLQIYKINPVLCQFLTRTMETWRTNIHLKTQDGHIQTEELLIRRGIFQGDSLSSLWFCLCLNPLSNALNNTNYGFNIRHQKVNQHRINHLLYMDDIKLYAATEVQLKELLRITEVCTSDVRMEFGMSKCKVLHINKGQWKNQSEQEILTGQTLDNMDKDETYKYLGFNQNIKIDHTQVKAQLTQEFRDRLVKLLKSKLNSKNLTKAINTFAIPVLTYSFGIIKWSHTDIENIHILIRTELTKHRMSHPNACKERLTIDRKQGGRGIIDIQSLRARQIKTLRHFFQSKQTNLHRAITKADKSYTPLNLSSPDHAADTHNPIQSQQEKINTWSQKPLHGKHRYRITQDQINEKQSYTWLQDGQLFPETEGFMLAIQDQVIATRNYKKYVIKDPSITNDNCRKCHQQKETIDHITSACKTLAGTEYTARHNSAAKIIHQALATKNKLIDNSDPYYKYTPTSVLDNDHYKLYWDVEIQTDKTINANRPDIVFQTKADKVTYLIDIAIPNDVNVQNTYAGKISKYTDLAIEVKRLWKQDKVIIIPLIMSVSGLTPNTFTQHLQQLGLDEGLHKIFQKSVILKTCNIVRSFLNSDQ

SEQ ID NO: 32293 - protein, 1245 aa, Callosobruchus maculatus
MHKVTSKNNQRRPRVRRLNSPEPQTHTEQPRERNPAADVLPAQPATTKAGKPRQRLQWTTEINKHVMHCYYTATKLETISTGYRHELHRLFIAQYPHLAERVTEQRLIDQKRVITKNNRLTPEELQAIKILVSNEINTAHPNHTQTSNKTTIDSTSTHSETDPEHEHTQHVPDTAVQPNDSLATELITERHAIRTRNNQPPDTDTTNNTSIHLVLDVENDHIPDTPETTRTNLPATTTQSQNVTIPPAITQSAEQVMNTQYNKWCGTNPTLRDPLPRLIFKNNTLQILHTINVNIIPQFLTKDSDLEDIHTVIYAAAATTLTLNGQKIPKRSIARTTERSKPKWQIRIENKISTIRKDLAHLAQYTNNNNRSKRIQTTINILKSKSPQQTISEIADTLKQKLAVYAARLRRYNESNARKDANNLFQKSEKQFYQKITADNQITAIEPPSKQELTEFWGSLWSEPKTHNENAPWIRQEEEKHQHIVEQGDVILTPEKIAETIKHTHNWKCPGVDNVQNFWYKQFSATYEMLTDQINKAILQPNRLPKFLTQGITHIKPKNADTKNPANYRPITCLPTLYKIITARICRRIEQHLSQNNILTEEQKGCRKHSQGCKEQLIIDSVIMEQTRKEHRNLHTCFIDYKKAFDSVPHSWLAKTLQIYKINPGLRQFLTRTMETWRTNIHLKTQDGHIKTDELHIRRGIFQGNSLSSLWFCLCLNPLSNALKNTNCGFNIRHERLNQHKINHLLYMDDIKLYAANELQLRELIRITEVCSADVRMEFGMSKCKVLHINKGQWKDHPEQETVTGQTLNNMNKDETYKYLGFNQNVKIDHTKVKAQLTQEFRDRLIKLLKTKLNSRNLTKAINTFAIPVLTYSFGIIKWSHTDIENIHILIRTELTKHRMSHPNACKERLTIDRKQGGRGIVDIQSLRTRQIKTLRHFFQNKQTNLHRAIVKADRNYTPLNLSCPDHAADTHNPTQSQQEKINTWSQKPLHGKHRYRITQDHINEKQSYTWLQDGQLFPETEGFMLAIQDQVIATRNYKKYIIKDPSITEDSCRKCHQQKETIDHITSGCKVLAGTEYTARHNSAAKVIHQALATANKLIENTDPYYNYTPTSVLENDRYKLYWDVEIHTDKTIPANRPDIVFQSKADKITYLIDIAIPNDVNVQNTYAGKISKYTDLAMEIKRLWKQNKVTIVPLIMSVSGLTPNTFTQHLQQLGLDEKLHKVFQKSVILKTCNIVRSFLNSDQ

SEQ ID NO: 32294 - protein, 899 aa, Callosobruchus maculatus
MRIENKITTIRKELPHLAQYTNNNNRSKRIQTTIDILKSKSPQKSIPEITDTLKQKLAVYAARLRRYNESNDRKDANNLFQKSEKQFYKKITTDNQITAIELPNKQELTEFWGSLWSEPKTHNENAPWIRQEEEKHQHIAEQGDVILTPEEIAETIKHTHNWKCPGVDNIQNFWYKQFSSVYEVLTDQINKAILQPNRLPKFLTQGITYIKPKNADTKNPANYRPITCLPTLYKIITATICRRIEKHLTENSILTEEQKGCRKQSQGCKEQLIIDSVIMEQTRKEHRNLHTCFIDYKKAFDSVPHSWLTKTLQIYKINPGLRQFLTRTMETWRTNIHLQTEDGHIQTDQLHIRRGIFQGDSLSSLWFCLCLNPLSNTLNSTNCGFTIRHQKANQHKINHLLYMDDLKLYAATEVQLRELLRITEVCTSDIKMEFGMSKCKVLHINKGQWKNHPEQEVVTGQALDNMDKDETYKYLGINQNAKIDHTKIKTQLTQEFKDRLIRLLKTKLNSRNLTKAINTFAIPILTYSFGIIKWSHTDIENIHILIRTELTKHRMSHPKACKERLTIDRKQGGRGIIDIQSLHAKQIKSLRHSFHSKQTNLHKAIVKADKNYTPLTLSCPDHAADAHNHIKAQQEKMNTWSQKALHGKHRYRVTQDHINEKQSYTWLQDGQLFPETEGFMLAIQDQVIATRNYRKYIMKDPSISDDNCRKCHQQKETIEHITSGCKTLAGTEYTARHNSAAKVIHQALATTNKLIENTDPYYNYTPTSVLENNQFKLYWDIEIHTDKTIPANRPDIVFQSKTDKVTYLIDIAIPNDMNIQNTYAGKISKYTDLAIEIKRLWKQNKVVIVPLIMSVSGLTPNTFTPHLQQLGLDEKLHKTFQKSVILKTCSIVRSFLNSE

SEQ ID NO: 32295 - protein, 988 aa, Callosobruchus maculatus
MNAQFNKWCGTNPALRDPLPRLIFNSNTQKILHTINTKVIPQFLTEDSNLEDIHTVIYAAAAATLIVNGQKLPKRSNNHRSKRSKPKWQMRIENKITTIRKELAHLAQYTNNNNRSKRIQTTIDILKSKSPQKSIPEITDTLKQKLAVYAARLRRYNESNDRKDANNLFQKSEKQFYKKITTDNQITAIELPNKQELTEFWGSLWSEPKTHNENAPWIRQEEEKHQHIAEQGDVILTPEEIAETIKHTHNWKCPGVDNIQNFWYKQFSSVYEVLTDQINKAILQPNRLPKFLTQGITYIKPKNADTKNPANYRPITCLPTLYKIITATICRRIEKHLTENSILTEEQKGCRKQSQGCKEQLIIDSVIMEQTRKEHRNLHTCFIDYKKAFDSVPHSWLTKTLQIYKINPGLRQFLTRTMETWRTNIHLQTEDGHIQTDELHIRRGIFQGDSLSSLWFCLCLNPLSNTLNSTDCGFTIRHQKANQHKINHLLYMDDLKLYAATEVQLRELLRITEVCTSDIKMEFGMSKCKVLHINKGQWKNHPEQEVVTGQALDNMDKNETYKYLGINQNAKIDHTKIKSQLTQEFKDRLIRLLKTKLNSRNLTKAINTFAIPILTYSFGIIKWSHTDIENIHILIRTELTKHRMSHPKACKERLTIDRKQGGRGIIDIQSLHAKQIKSLRHFFHSKQTNLHKAIVKADKNYTPLALSCPDHAADAHNHIKAQQEKINTWSQKALHGKHRYRVTQDHINEKQSYTWLQDGQLFPETEGFMLAIQDQVIATRNYRKYIMKDPSISDDNCRKCHQQKETIEHITSGCKTLAGTEYTARHNSAAKVIHQALATTNKLIENTDPYYNYTPTSVLENNQFKLYWDIEIHTDKTIPANRPDIVFQSKTDKVTYLIDIAIPNDMNIQNTYAGKISKYTDLAIEIKRLWKQNKVVIVPLIMSVSGLTPNTFTPHLQQLGLDEKLHKTFQKSVILKTCNIVRSFLNSE

SEQ ID NO: 32296 - protein, 977 aa, Callosobruchus maculatus
MREELRKSDNNNKKNTQQILHTINSNIIPQFLTNVSNLEDIHTVIYAAAATTLTVNGQKLPKRSKDHTSNRPKPKWQIRIENKISAIRKDLAHLAQYTNNNNRSKRIQTTIDILKSKSPQKSIPEIADTLKQKLAVYAARLRRYNESNERKNANNLFQKSEKQFYQKISANNQEATIEPPSRQDLTEFWSSLWSEPKTHNQDAPWIRQEEEKHQHIMEQGDVILTPEEIAETIKHTHNWKCPGVDNIQNFWYKQFSSTYEVLTDQINKAIPQPNRLPKFLTQGITYIKPKNTDTKNPANYRPITCLPTLYKIITATICRRIEQHLTQNNILTEEQKGCRKQSQGCKEQLIIDSVIMEQTRKEHRNFHTCFIDYKKAFDSVPHSWLKKTLQIYKINSGLRQFLTRIMETWRTNIHLKTQHGHIQTDELHIRRGIFQGDSLSSLWFCLCLNPLSNAHNNTNCGFNIRQQKVNQHKINHLLYMDDIKLYAATEVQLRELLRITEVCTSDVRMEFGMSKCKVLHINKGQWKSHQERETLTGQTLDNMDKGETYKYLGFNQSVKIDHSQVKEQLIQEFRDRLIKLLKTKLNSRNLTKAINTFAIPVITYSFGIIKWSHTDIQNIQILIRTELTRHRMSHPNACKERLTIDRKQGGRGIIDIQSLRTKQIKTLRHFFQSKQTNLHRAIVKADKNYTPLTLSSPNHAADTHNPIELQQEKINTWSQKALHGKHRYRITQDHINEKQSYTWLQDGQLFPETEGFMLAIQDQVIATRNYKKYIIKDPSVTNDNCRKCHQQKETIDHITSACKTLAGTEYTARHNSAAKIIHQALATTNNLIENTAPYYNYTPTSVLDNNQYKLYWDVEIHTDKTIPANRPDIVFQSKADKVTYLIDIAIPNDTNVQTAYAGKISKYTDLAIEVKRLWKQNKVVIVPLIMSVSGLTPNTFTPHLHQLGLDEKLHKIFQKSVILKTCNTVRSFLNSDQ

SEQ ID NO: 32297 - protein, 1209 aa, Callosobruchus maculatus
MDRVNFMNNQRRPRVRRLNSPEPQTQTEQPIEHNPAADVLPTQPATTKAGKPRQRLQWTTEMNKSVMRCYYTATKLETISTGYRHELHRLFTTQYPHLSTRVTEQRLIDQKRVITKNNRLTPQELQDIKNLVSNEMNTVQPNDSLTTEQIVETQNSDTQTSQTSNTAKTNNTSIHSEPGPEHDQALGTPDTTITNLPSTIIQIQNITRPFAVTQSVEQVMSTQYNKWCGTNPALRDPLPRLIFKNNTQQILHTVNANVIPQFIRDDSNLEDIHTVIYAAAATTLIVNGQKLSKRSKHQTSNRTKPKWQIRIENKISTIRKDLAHLAQYTINNNHPSRHIQRTINILKSKSPQQTIPEITDTLKQKLAVYAARLRRYNESNARKDANSLFQKSEKQFYQKITADNQITTIEPPSKQELTEFWGSLWSEPKTHNEDAPWIREEEEKHQHIAEQGDVILSKEEIVETIKHTHDWKCPGVDNVQNFWYKHFRSTYEVLTNQINKAIRQPDRLPKFLTQGITYIKPKNADTKNPANYRPITCLPTLYKIITATLCRRIEQHLTQNNILTEEQKGCRKQSQGCKEQLIIDSVIMEQTRKEHRNLHTCFIDYKKAFDSVPHSWLTKILQIYKINPGLRQFLAKTMKTWRTNIHLTTQDGHIQTEELHIRRGIFQGDSLSSLWFCLCLNPLSNALNNTNYGFNIRHQKVNQHRINHLLYMDDIKLYAATDVQLRELLRITEVYTSDVRMEFGMNKCKVLHINKGQWKNHPEQEIVTGKTLDNMDKEETYKYLGFNQSVKIDHTQIKAELRQVFRDRLIKLLKTKLNSRNLTKAINTFAIPILTYSFGIIKWSHTDIENIHILIRTELTKHRMSHPNACKERLTIDRTQGGRGITDIQSLRTRQIKTLRHFFQNKQTNLHRAIVKADKNYTPLNLSCPDHVADTHNPTQSQQEKISTWSQKPLHGKHRYRVTQDHINKKQSYTWLQDGQLFPETEGFMLAIQDQVIATRNYKKYIIKDPSITDDNCRKCQQQKETIDHITSGCKTLAGTEYTARHNSAAKVIHQALATTNKLIENTDPYYNYTPTSVLENDQYKLYWDVQIHTDKTIPANRPDIVFQSKLDKVTYLIDIAIPNDVNIQNTYAGKISKYTDLAMEIKRLWNQEKVTIVPLIMSVSGLTPNTFTPHLQQLGLDEKLHKTFQKYVILKTCNIVRSFLNSDQ

SEQ ID NO: 32298 - protein, 1207 aa, Callosobruchus maculatus
MHKVTSTNNQRRPRVRRLNSPEPQTEKEQPIGDNPVADVLPVEPATTKAGKPRQRLQWTTEMNTSVMHCYYTATKLETISTGYRHELHRLFTAQYPHLSARVTEQRLIDQKRVITKNNRLTPQQLQAIKNLVADEINTVETNDSLVNESIMETQHDHTLNDKTPNTNTTNTTSTHLEENPEHEFIPDAPDTVCTNRPPTTTRNQNVTQTSSFTQSAEQVMNAQFNKWCGTNPALRDPLPRLIFNSNTQKILHTINTNVIPQFLTKDSNLEDIHTVIYAAAAATLIVNGQKLPKRSNNHRSKKSKPKWQMRIENKITTIRKELAHLAQYTNNNNRSKRIQTTIDILKSKSPQKSIPEITDTLKQKLAVYAARLRRYNESNDRKDANNLFQKSEKQFYKKITTDNQITAIELPNKQELTEFWGSLWSEPKTHNEDAPWIRQEEEKHQHIAEQGDVILTPEEIAETIKYTHNWKCPGVDNIQNFWYKQFSSVYEVLTDQINKAILQPNRLPKFLTQGITYIKPKNADTKNPANYRPITCLPTLYKIITATICRRIEKHLTENSILTEEQKGCRKQSQGCKEQLIIDSVIMEQTRKEHRNLHTCFIDYKKAFDSVPHSWLTKTLQIYKINPGLRQFLTRTMETWRTNIHLQTEDGHIQTDQLHIRRGIFQGDSLSSLWFCLCLNPLSNTLNSTNCGFTIRHQKANQHKINHLFYMDDLKLYAATEVQLRELLRITEVCTSDIKMEFGMSKCKVLHINKGQWKNHPEQEVVTGQALDNMDKDETYKYLGINQNAKIDHTKIKTQLTQEFKDRLIRLLKTKLNSRNLTKAINTFAIPILTYSFGIIKWSHTDIENIHILIRTELTKHRMSHPKACKERLTIDRKQGGRGIIDIQSLHAKQIKSLRHFFHSKQTNLHKTIVKADKNYTPLSLSCPDHAADAHNHIQAQQEKINTWSQKALHGKHRYRVTQDHINEKQSYTWLQDGQLFPETEGFMLAIQDQVIATRNYRKYIMKDPSISDDNCRKCHQQKETIEHITSGCKTLAGTEYTARHNSAAKVIHQALATTNKLIENTDPYYNYTLTSVLENNQFKLYWDIETHTDKTIPANRPDIVFQSKTDKVTYLIDIAIPNDMNIQNTYAGKISKYTDLAIEIKRLWKQNKVVIVPLIMSVSGLTPNTFTPHLQQLGLDEKLHKTFQKSVILKTCSIVRSFLNSE

SEQ ID NO: 32299 - protein, 1260 aa, Callosobruchus maculatus
MDKVNLINNPRRPRVRRLNSPESQTRTQQPIAHNPAADVLPAQPATTKAGKPRQRLQWTTEMNKFVMRCYYTATKLETISTGYRHELHRLFIAQYPHLAERVTEQRLIDQKRVITKNNRLTPQELQAVKKRVANEINTVHPIDSLVTESITETQNIHTRNNQTTNTATTNNISIQSEIDSEHEHTPNTPDITFTNLPATTTQSQQTSQPRSVTQSAEAVNTAQPPSISGEPEQMTNSRTTQFNKRCNTTTQNQNQNIARSPSITQTAEQVMNTQFNKWCGTNPALRDPLPRLIFKNNTQQILHTINTNLIPQFITNNSNLEDIHTVIYAAAATALIVNGQKLQKRSKDQRSNRAKPKWQIRIENKISTLRKDLAHLAQYSNNNNHPSKHIQRTINILKSKSPQKSIPEIADTLKQKLAVYAARLRRYNESNDRKDANNLFQKSEKQFYQKITSNNQITTIEPPSRQELTAFWRSLWSEPKTHNENAPWIRQEETKHQHITEQGNVILTTEEIAETIKHTHNWKCPGVDNVQNFWYKQFSSTYEMLTDQINKAILQPNRLPKFLTQGITYIKPKNADTKNPANYRPITCLPTLYKIITASICRRIEQHLMQNNILTEEQKGCRKHSQGCKEQLIIDSVIMEQTRKEHRNLHTCFIDYKKAFDSVPHSWLMKTLQIYKINPGLRQFLKSTMETWRTNIHLQTHDGHIQTDELHIRRGIFQGDSLSSLWFCLCLNPLSNTLNSTNHGFNIRHHKADQHKINHLLYMDDIKLYAATEVQLRELLKITEVYTSDIRMEFGMSKCKVLHINKGQWKNQPEKEVVTGQPLDNMDKDETYKYLGFNQNVKIDHTQVKAQLTQEFKDRLIKLLKTKLNSKNLTKAINTFAIPVLTYSFGIIKWSHTDIENIHILIRTELTKHRMSHPNACKERLAIDRKLGGRGIIDIQSLRTTQIQTLRHFFHTKQTNLHKAIVKADKNYTPLNLSSPDHVADTYNHIQSQQEKINTWSQKALHGKHRYRVTQDHINQKQSYAWLQDGQLFPETEGFMLAIQDQVIATRNYKKYIIKDPSITDDNCRKCQQQKETIDHITSGCKTLAGTEYTARHNSAAKVIHQALATTNKLIENTDPYYNYTPTSVLENDQYKLYWDVEIHTDKTIPANRPDIVFQSKADKITYLIDIAIPNDVNIQNTYAGKISKYTDLAMEIKRLWKQNKVTIVPLIMSVSGLTPSTFTQHLQQLGLDEKLHKIFQKSVILKTCNIVRSFLNSDQ

SEQ ID NO: 32300 - protein, 1242 aa, Callosobruchus maculatus
MHKVTSKNNQRRPRVRRLNSPEPQTQTEQPRQHNPAADVLPAQPATTKAGKPRQRLQWTTEINKHVMHCYYTATQLETISTGYRHELHRLFIAQYPHLAERVTEQRLIDQKRVITKNNRLTPEELQAIKILVSNEINTAHPNHPQTSNRTTIDNTSIHSETDPEHEHTQHIPDSAVQPNDSLATESITERHAIRTRNNQPPNTGTTNTTSIHLELDLENDHTPETTCTNLPSTATQSQNITLPPAITQSAEQVMNTQYNKWCGTNPTLRDPLPRLIFKNNTLQILHTINVNIIPQFLTKDSDLEDIHTVIYAAAATALTLNGQKLPKRSIARTTERSKPKWQIRIENKISTIRKDLAHLAQYTNNNNRSKRVQTTINMLKSKSPQQTIPEIADTLKQKLAVYAARLRRYNESNARKEANNLFQKSEKQFYQKITADNQITAIEPPSKQELTEFWGSLWSEPKTHNENAPWIRQEEEKHQHIVEQEDVILTPEEIAETIKHTHNWKCPGVDNVQNFWYKQFSATYEMLTDQINKAILQPNRLPKFLTQGITYIKPKNADTKNPANYRPITCLPTLYKIITATICRRIEQHLTQNNILTEEQKGCRKQSQGCKEQLIIDSVIMEQTRKEHRNLHTCFIDYKKAFDSVPHSWLAKTLQIYKINPGLREFLASTMETWRTSIHLKTQDGLIKTDELHIRRGIFQGDSLSSLWFCLCLNPLSNALNNTNCGFNIRHDRLNQHKINHLLYMDDIKLYAANEVQLKELIRTTEACSSDVRMEFGMSKCKVLHINKGQWKDHPQQETVAGQTLNNMNKDETYKYLGFNQNVKIDHTQVKAQLTQEFRDRLIKLLKTKLNSRNLTKAINTFAIPVLTYFFGIIKWSHTDIENIHILIRTELTKHRMSHPNACKERLTIDRKQGGRGITDIQSLRTRQIKTLRHFFQNKQTNLHRAIVKANKNYTPLNLSCPDHVADTHNPTQSQQEKISTWSQKPLHGKHRYRITQDHINEKQSYTWLQDGQLFPETEGFMLAIQDQVIATRNYKKYVIKDPSITNDNCRKCQQQKETIDHITSVCKTLAGTEYTARHNSAAKIIHQALATKNKLIENSDPYYKYTPTSVLEDDHYKLYWDVEIHTDKTINANRPDIVFQIKADKVTYLIDIAIPNDVNVQNTYAGKISKYTDLAIEVKRIWKQDKVIIVPFIMSVSGLTPNTFTQHLQQLGLDESLHKIFQKSVILKACNIVRSFLNSDQ

SEQ ID NO: 32301 - protein, 761 aa, Callosobruchus maculatus
MEQGDVILTPEEIAETIKHTHNWKCPGVDNIQNFWYKQFSSTYEVLTDQINKAILQPNRLPKFLTQGITYIKPKNTDTKNPANYRPITCLPTLYKIITATICRRIEQHLTQNNILTEEQKGCRKQSQGCKEQLIIDSVIMEQTRKDHRNLHTCFIDYKKAFDSVPHSWLKKTLQIYKINSGLRQFLTRIMETWRTNIHLKTQHGHIQTDELHIRRGIFQGDSLSSLWFCLCLNPLSNALNNTNCGFNIRHEKVNQHKINHLLYMDDIKLYAATEVQLRELLRVTEVCTSDVRMEFGMSKCKVLHINKGQWKSHQERETLTGQTLDNMDKGETYKYLGFNQSVKIDHSQVKEQLIQEFRDRLIKLLKTKLNSRNLTKAINTFAIPVITYSFGIIKWSHTDIENIQILIRTELTRHRMSHPNACKERLTIDRKQGGRGIIDIQSLRTKQIKTLRHFFQSKQTNLHRAIVKADKNYTPLTLSSPNHAADTHNPIELQQEKINTWSQKALHGKHRYRITQDHINEKQSYAWLQEGQLFPETEGFMLAIQDQVIATRNYKKYIIKDPSVTNDNCRKCHQQKETIDHITSACKTLAGTEYTARHNSAAKIIHQALATTNKLIENTAPYYNYTPTSVLDNNQYKLYWDVEIHTDKTIPANRPDIVFQSKADKVTYLIDIAIPNDTNVQTAYAGKISKYTDLAIEVKRLWKQNKVVIVPLIMSVSGLTPDTFTPHLHQLGLDEKLHKIFQKSVILKTCNIVRSFLNSDQ

SEQ ID NO: 32302 - protein, 926 aa, Callosobruchus maculatus
MDSEHEHIPDTPDQTSINLPLTATQSQKVTPPPSITQSTEQVMDIQYNKWCGTNPALRDPLPRLIFKNNTQQILHTINSNIIPQFLTNVSNLEDIHTVIYAAAATALTVNGQKLPKRSKDHKSNRPKPKWQIRIENKISAIRKDLAHLAQYTNNNNRSKRIQTTIDILKSKSPQKSIPEIADTLKQKLAVYAARLRRYNESNERKNANNLFQKSEKQFYQRITANNQEVTIEPPSRQDLTEFWSSLWSEPITHNQDAPWIRQEEEKHQHIMEQGDVILTPEEIAKTIKHTHNWKCPGVDNIQNFWYKQFSSTYEVLTDQINKAILQPNRLPKFLTQGITYIKPKNTDTKNPANYRPITCLPTLYKIITATICRRIEQHLTQNNILTEEQKGCRKQSQGCKEQLIIDSVIMEQTREEHRNLHTCFIDYKKAFDSVPHSWLKKTLQIYKINSGLRQFLTRIMETWRTNIHLKTQHGNIQTDELHIRRGIFQGDSLSSLWFCLCLNPLSNALNNTSCGFNIRHEKVNQHRISHLLYMDDIKLYAATEVQLRELLRITEVCTSDVRMEFGMSKCKVLHINKGQWKSHQERETLTGQTLDNMDKGETYKYLGFNQSVKIDHSQVKEQLIQEFRDRLIKLLKTKLNSRNLTKAINTFAIPVITYSFGIIKWSHTDIENIQILIRTELTRHRMSHPNACKERLTIDRKQGGRGIIDIQSLRTKQIKTLRHFFQSKQTNLHRAIVKADKNYTPLTLSSPNHAADTHNPIELQQEKINTWSQKALHGKHRYRITQDHINEKQSYTWLQDGQLFPETEGFMLAIQDQVIATRNYKKYIIKDPSVTNDNCRKCHQQKETIDHITSACKTLAGTEYTARHNSAAKIIHQALATTNKLIENTAPYYNYTPTSVLTTINTNYTGTSKYTQTKLSQPIDQI

SEQ ID NO: 32303 - protein, 1207 aa, Callosobruchus maculatus
MDKVSFSNNQRRPRVRRLNSPEPQSQTQQPIAHNPTADVLPVQPATTKAGKPRQRLQWTTEMNKSVMHCYYTATRLETISTGYRHELYRLFTAQYPHLSTRVTEQRLIDQKRVITKNNRLTPQELQAIKSLVSNEINTVTPNDSLADESITERQNNHTGSNQTPNTDTTNNTSIHLDVESEHEHIPDTPDQTSINLPSTATQSQNVTPPPCITQSTEQVMNTQYNKWCGTNPTLRDPLPRLIFKNNTRQILQTVNSNIIPQFLTKDSNLEDIHTVIYAAAATTLIVNGQKLPKRSKDHTSKRSKPKWQIRIENKISTIRKDLAHVTQYIHKNNLSKRIQTTISRLKSRSPQQTISEIYDTLKQKLAVYAARLRRYNESNDRKDTNNLFQKSERQFYQKITSNNQITIEPPSRKELTDFWGSLWSEPKTHNENAPWIRQEEEKQQHIPEQGDVILTPQEIAETIKHTHNWKCPGVDNVQNFWYKQFSATYEMLTDQINKAILQPNRLPKFLTQGVTYIKPKNADTKNPANYRPITCLPTLYKIITATIGKRIEQHLTQNNILTEEQKGCRKQSQGCKEQLIIDSVIMEQTRKEHRNLHTCFIDYKKAFDSVPHSWLTKTLQIYKINPTLRQFLTRIMETWRTNIHLKTQDGHIQTEELYIRRGIFQGDSLSSLWFCLCLNPLSNALNNTNYGFNIRHQKVNQHRISHLLYMDDIKLYAATEVQLKELLKITEVCTSDVRMEFGMSKCKVLHIHKGQWKNHSEQEILTGETLDNMEKDETYKYLGFNQNIKIDHSEVKAQLTQEFRDRLITLLKTKLNSKNLTKAINTFAIPVLTYSFGIIKWSHTDIENINILIRTELTKHRMSHPKACKERLTIDRKHGGRGIIDIQSLHTRQIKTLRNFLQSKETNLHRSIVKADKNYTPLTLSRPDHPADAHNHIELQQEKINTWSQKALHGKHRYRVTQDHINERQSYTWLQDGQLFPETEGFMLAIQDQVIATRNYMKYIIKDTSITDDNCRKCHQQKETIDHITSACKTLAGTEYTARHNAAAKVIHQALATTNKLIENTDPYYNYTPTSVLENNEYKLYWDVEIHTDKTIPANRPDIVFQSKADKVTYLIDIAIPNDTNIQNAYAGKISKYTDLAIEIKRLWKQNKVTIVPLIMSVSGLTPNTFTPHLQQLGLDERLHKIFQKSVILKTCNIVRSFLNSDP

SEQ ID NO: 32304 - protein, 1209 aa, Callosobruchus maculatus
MDRVNFMNNQRRPRVRRLNSPEPQTQTEQPIEHNPAADVLPTQPATTKAGKPRQRLQWTTEMNKSVMRCYYTATKLETISTGYRHELHRLFTTQYPHLSTRVTEQRLIDQKRVITKNNRLTPQELQDIKNLVSNEMNTVQPNDSLTTEQIVETQNSDTQTSQTSNTAKTNNTSIHSVLGPEHDQALDTPDTTITNLPSTIIQILNITRPFAVTQSVEQVMSTQYNKWCGTNPALRDHLPRLIFKNNTQQILHTVNANIIPQFIRDDSNLEDIHTVIYAAAATTLIVNGQKLSKRSKHQTSNRTKPKWQIRIENKISTIRKDLAHLAQYTINNNHPSRHIQRTINILKSKSPQQTIPEITDTLKQKLAVYAARLRRYNESNARKDANSLFQKSEKQFYQKITADNQITTIEPPSKQELTEFWGSLWSEPKTHNEDAPWIREEEEKHQHIAEQGDVILSKGEIVETIKHTHDWKCPGVDNVQNFWYKHFSSTYEVLTNQINKAIRQPDRLPKFLTQGITYIKPKNADTKNPANYRPITCLPTLYKIITATLCRRIEQHLTQNNILTEEQKGCRKQSQGCKEQLIIDSVIMEQTRKEHRNLHTCFIDYKKAFDSVPHSWLTKILQIYKINPRLRQFLAKTMKTWRTNIHLTTQDGHIQTEELHIRRGIFQGDSLSSLWFCLCLNPLSNALNNTNYGFNIRHQKVNQHRINHLLYMDDIKLYAATDVQLRELLRITEVCTSDVRMEFGMNKCKVLHINKGQWKNHPEQEIVTGQTLDNMDKEETYKYLGFNQSVKIDNTQIKAELRQVFRDRLIKLLKTKLNSRNLTKAINTFAIPILTYSFGIIKWSHTDIENIHILIRTELTKHRMSHPNACKERLTIDRTQGGRGITDIQSLRTRQIKTLTHFFQNKQTNLHRAIVKADKKYTPLNLSCPDHVADTHNPTQSQQEKISTWSQKPLHGKHRYRVTQDHINKKQSYTWLQDGQLFPETEGFMLAIQDQVIATRNYKKYIIKDPSITDDNCRKCQQQKETIDHITSGCKTLAGTEYTARHNSAAKVIHQALATTNKLIENTDPYYNYTPTSVLENDQYKLYWDVQIHTDKTIPANRPDIVFQSKLDKVTYLIDIAIPNDVNIQNTYAGKISKYTDLAMEIKRLWKQDKVTIVPLIMSVSGLTPNTFTPHLQQLGLDEKLHKTFQKSVILKTCNIVRSFLNSDQ

SEQ ID NO: 32305 - protein, 934 aa, Callosobruchus maculatus
MTNSRTTQFNKRCNTTTQSQNQNIARSPSITQTAEQVMNTQFNKWCGTNPALRDPLPRLIFKNNTQQILHTINTNLIPQFITNNSNLEDIHTVIYAAAATTLIVNGQKLQKRSKDQRSNRAKPKWQIRIENKISTLRKDLAHLAQYSNNNNHPSKHIQRTINIMKSKSPQKSIPEIADTLKQKLAVYAARLRRYNESNDRKDANNLFQKSEKQFYQKITSNNQITTIEPPSRQELTAFWRSLWSEHKTHNENAPWIRQEETKHQHITEQGNVILTTEEIAETIKHTHNWKCPGVDNVQNFWYKQFSSTHEMLTDQINKAILQPNRLPKFLTQGITYIKPKNADTKNPANYRPITCLPTLYKIITATICRRIEQHLMQNNILTEEQKGCRKYSQGCKEQLIIDSVIMEQTRKEHRNLHTCFIDYKKAFDSVPHSWLMKTLQIYKIIPGLRQFLKSTMETWRTNIHLQTHDGHIQTDELHIRRGIFQGDSLSSLWFCLCLNPLSNTLNSTNHGFSIRHHKADQHKINHLLYVDDIKLYAATEVQLRELLKITEVYTSDIRMEFGMSKCKVLHINKGQWKNQPEKEVVTGQPLDNMDKDETYKYLGFNQNVKIDHTQVKAQLTQEFKDRLIKLLKTKLNSKNLTKAINTFAIPVLTYSFGIIKWSHTDIENIHILIRTELTKHRMSHPNACKERLAIDRKLGGRGIIDIQSLRTTQIQTLRHFFHTKQTNLHKAIVKADKNYTPLNLSSPDHVADTYNHIQSQQEKINTWSQKALHGKHRYRVTQDHINQKQSYAWLQDGQLFPETEGFMLAIQDQVIATRNYKKYIIKDPSITDDNCRKCQQQKETIDHITSGCKTLAGTEYTARHNSAAKVIHQALATTNKLIENTDPYYNYTPTSVLENDQYKLYWDVEIHTDKTIPANRPDIVFQSKATKLPI

SEQ ID NO: 32306 - protein, 1030 aa, Callosobruchus maculatus
MLDIVGPNKTLVYCFYLFEFVGQNQNIARSPSITQTAEQVMNTQFNKWCGTNPALRDPLPRLIFKNNTQQILHTINTNLIPQFITNNSNLEDIHTVIYAAAATTLIVNGQKLQKRSKDQRSNRPKPKWQIRIENKISTLRKDLAHLAQYSNNNNHPSKHIQRTINILKSKSPQKTIPEIADTLKQKLAVYAARLRRYNESNERKDANNLFQKSEKQFYQKITSNNQITTIEPPSRKELTAFWRSLWSEPKTHNENAPWIRQEETKHQHITEQGNVILTTEEIAETIKHTHNWKCPGVDNVQNFWYKQFSSTYEMLTDEISKAILQPNRLPKFLTQGITYIKPKNSDTKNPANYRPITCLPTLYKIITATICRRIEQHLMQNNILAEEQKGCRKHSQGCKEQLIIDSVIMEQTRKEHRNLHTCFIDYKKAFDSVPHSWLMKTLQIYKINPGLRQFLKSTMESWRTNIHLQTHDGHIQTDELHIRRGIFQGDSLSSLWFCLCLNPLSNTLNSTNHGFNIRHHKADQHKINHLLYMDDIKLYAATEVQLRELLKITEVYTSDIRMEFGMSKCKVLHINKGQWKNQPEKEVVTGQPLDNMDKDETYKYLGFNQNVKIDHTQVKAQLTQEFKDRLIKLLKTKLNSKNLTKAINTFAIAVLTYSFGIIKWSHTDIENIHILIRTELTKHRMSHPNTCKERLTIDRKLGGRGFIDIQSLRTTQIQTLRHFFHTKQTNLHKAVVKADKNYTPLNLSSPDHVADKYNHIQSQQEKINTWSQKALHGKHRYRVTQDHINQKQSYTWLQDGQLFPETEGFMLAIQDQVIATRNYKKYIIKDPSITDDNCRKCQQQKETVDHITSGCKTLAGTEYTARHNSAAKVIHQALATASRLIENTDPYYNYTPTSVLENDQYKLYWDVEIHTDKTIPANRPDIVFQSKADKITYLIDIAIPNDVNIQNTYAGKISKYTDLAMEIKRLWKQNKVTIVPLIMSVSGLTPNTFTQHLQQLGLDKKLHKVFQKSVILKTCNIVRSFLNSDQ

SEQ ID NO: 32307 - protein, 884 aa, Callosobruchus maculatus
MNTQYNKWCGTNPTLRDPLPRLIFKNNTLQILHTINVNIIPQFLTKDSDLEDIHTVIYAAAATTLILNGQKLPKRSIARTTERSKPRWQVRIENKISTIRKDLAHLAQYTNNNNRSKRVQTTINILKSKSPQQTILEIADTLKQKLAVYAARLRRYNESNARKDANNLFQKSEKQFYQKITADNQITAIEPPSKQELTEFWGSLWSEPKTHNENAPWIRQEEEKHQHIVEQGDVILTPEEIAETIKHTHNWKCPGVDNVQNFWYKQFSATYEMLTDQINKAILQPNRLPKFLTQGMTYIKPKNADTKNPANYRPITCLPTLYKIITATRCRRIEQHLTQNNILTEEQKGCRKQSQGCKEQLIIDNVIMEQTRKEHRNLHTCFIDYKKAFDSVPHSWLAKTLQIYKISPGLREFLTRTMETWRTSIHLKTQNGHIKTDELHIRRGIFQGDSLSSLWFCLCLNPLSNALNNTNCGFNIRHEKLNQHRINHLLYMDDIKLYAANEVQLRELIRITETCSSDVRMEFGLSKCKVLHINKGQWKDHPQQETVAGQTLNNMNKDETYKYLGFNQNVKIDHTQVKAQLTQEFRDRLIKLLKTKLNSRNLTKAINTFAIPVLTYSFGIIKWSHTDIENIHILIRTELTKHRMSHPNACKERLTIDRKQGGRGITDIQSLRTRQIKTLRHFFQNKQTNLHRAIVKADKNYTPLNLSCSDHVADTHNPTQSQQEKISAWSQKPLHGKHRYRITQDHINEKQSYTWLQDGQLFPETEGFMLAIQDQVIATRNYKKYVIKDPSITDDNCRICHQQKETIDHITSGCKTLAGTEYTARHNSAAKVIHQALATTNKLIENSDPYYNYTPTSVLETINTNYTGMLKYIQTRLSQPIDQI

SEQ ID NO: 32308 - protein, 1209 aa, Callosobruchus maculatus
MDRVNFMNNQRRPRVRRLNSPESQTQTEQPIEHNPAADVLPTQPATTKAGKPRQRLQWTTEMKKSVMRCYYTATKLETISTGYRHELHRLFTTQYPHLSTRVTEQRLIDQKRVITKNNRLTPQELQDIKNLVSNEMNIVQPNHSLATEPIVETQNSHTQTSQTSNTAKTNNASIHSELSSEHDQTLDTPDTTITNLPSTTIQIQNITRPFAVTQSVEQVMSTQFNKWCGTNPALRDPLPRLIFKNNTQQILHTVNANVIPQFITDDSNLEDIHTVIYAAAATTLIVNGQKLSKRSKHQTSNRTKPKWQIRIENKISTIRKDLAHLAQYSINNNHPSRHIQRTINILKSKSPQQTIPEITDTLKQKLAVYAARLRRYNESNARKDANSLFQKSEKQFYQKITADNQITTIEPPSKQELTEFWGSLWSEPKTHNEDAPWIREEEEKHQHIAEQGDVILSKEEIVETIKHTHDWKCPGVDNVQNFWYKHFSSTYEVLTNQINKAIRQPDRLPKFLTQGITYIKPKNADTKNPANYRPITCLPTLYKIITATLCRRIEQHLTQNNILTEEQKGCRKQSQGCKEQLIIDSVIMEQTRKEHRNLHTCFIDYKKAFDSVPHSWLTKILQIYKINPGLRQFLAKTMKTWRTNIHLTTQDGHIQTEELHIRRGIFQGDSLSSLWFCLCLNPLTNALNNTNYGFNIRHQKVNLHRINHLLYMDDIKLYAASEVQLRELLKITEVCTLDVRMEFGMSKCKVLHINKGQWKNHSEQEIVTDQTLDNMGKDETYKYLGFNQNVKIDHTQVKAQLKQEFRDRLIRLLKTKLNSRNLTKAINTFAIPILTYSFGIIKWSHTDIENIHILMRTELTKHRMSHPNACKERLTVHRKQGGRGIIDIQSLHTRQIKTLRHFFQSKQTNLHGAIVKADKNYTPLNLSCPDHVADTYNHIQSQQEKINTWSQKALHGKHRYRVTQDHINEKQSYTWLQDGQLFPETEGFMLAIQDQVIATRNYKKYIIKDPSITDDNCRKCQQQKETIDHITSGCKTLAGTEYTARHNSAAKVIHQALATTNKLIENTDPYYNYTPTSVLENDQYKLYWDVQIHTDKTIPANRPDIVFQSKLDKVTYLIDIAIPNDVNIQNTYAGKISKYTDLAMEIKRLWKQDKVTIVPLIMSVSGLTPNTFTPQLQQLGLDEKLHKTFQKSVILKTCNIVRSFLNSDQ

SEQ ID NO: 32309 - protein, 622 aa, Callosobruchus maculatus
MEQTRKEHRNLHTCFIDYKKAFDSVPHSWLTKILQIYKINPGLRQFLAKTMKTWRTNIHLTTQDGHIQTEELHIRRGIFQGDSLSSLWFCLCLNPLSNALNNTNYGFNIRHQKVNQHRINHLLYMDDIKLYAATDVQLRELLRITEVYTSDVRMEFGMNKCKVLHINKGQWKNHPEQEIVTGQTLDNMDKEETYKYLGFNQSVKIDHTQIKAELRQVFRDRLIKLLKTTLNSRNLTKAINTFAIPILTYSFGIIKWSHTDIENIHILIRTELTKHRMSHPNACKERLTIDRTQGGRGITDIQSLRTRQIKTLRHFFQNKQTNLHRAIVKADKNYTPLNLSCPDHVADTHNPTQSQQEKISTWSQKPLHGKHRYRVTQDHINRKQSYTWLQDGQLFPETEGFMLAIQDQVIATRNYKKYIIKDPSITDDNCRKCQQQKETIDHITSGCKTLAGTEYTARHNSAAKVIHQALATTNKLIENTDPYYNYTPTSVLENDQYKLYWDVQIHTDKTIPANRPDIVFQSKLDKVTYLIDIAIPNDVNIQNTYAGKISKYTDLAMEIKRLWKQDKVTIVPLIMSVSGLTPNTFTPHLQQLGLDEKLHKTFQKSVILKTCNIVRSFLNSDQ

SEQ ID NO: 32310 - protein, 942 aa, Callosobruchus maculatus
MRFSVNNNNNNNNNQRKNKTCIIIITRPEHQTSNRTKPKWQIRIENKISTIRKDLAHLAQYTINNNHPSRHIQRTINILKSKSPQQTIPEITDTLKQKLAVYAARLRRYNESNARKDANSLFQKSEKQFYQKITADNQITTIEPPSKQELTEFWGSLWSEPKTHNEDAPWIREEEEKHQHIAEQGDVILSKEEIVETIKHTHDWKCPGVDNVQNFWYKHFSSTYEVLTNQINKAIRQPDRLPKFLTQGITYIKPKNADTKNPANYRPITCLPTLYKIITATLCRRIEQHLTQNNILTEEQKGCRKQSQGCKEQLIIDSVIMEQTRKEHRNLHTCFIDYKKAFDSVPHSWLTKILQIYKINPGLRQFLAKTMKTWRTNIHLTTQDGHIQTEELHIRRGIFQGDSLSSLWFCLCLNPLSNALNNTNYGFNIRHQKVNQHRINHLLYMDDIKLYAATDVQLRELLRITEVYTSDVRMEFGMNKCKVLHINKGQWKNHPEQEIVTGQTLDNMDKEETYKYLGFNQSVKIDHTQIKAELRQVFRDRLIKLLKTKLNSRNLTKAINTFAIPILTYSFGIIKWSHTDIENIHILIRTELTKHRMSHPNACKERLTIDRTQGGRGITDIQSLRTRQIKTLRHFFQNKQTNLHRAIVKADKNYTPLNLSCPDHVADTHNPTQSQQEKISTWSQKPLHGKHRYRVTQDHINKKQSYTWLQDGQLFPETEGFMIAIQDQVIATRNYKKYIIKDPSITDDNCRKCQQQKETIDHITSGCKTLAGTEYTARHNSAAKVIHQALATTNKLIENTDPYYNYTPTSVLENDQYKLYWDVQIHTDKTIPANRPDIVFQSKLDKVTYLIDIAIPNDVNIQNTYAGKISKYTDLAMEIKRLWKQDKVTIVPLIMSVSGLTPNTFTPHLQQLGLDEKLHKTFQKSVILKTCNIVRSFLNSDQ

SEQ ID NO: 32311 - protein, 944 aa, Callosobruchus maculatus
MYNNNNNNNNNNAAAATTLIVNGQKLSKRSKHQTSNRTKPKWQIRIENKISTIRKDLAHLAQYTINNNHPSRHIQRTINILKSKSPQQTIPEITDTLKQKLAVYAARLRRYNESNARKDANSLFQKSEKQFYQKITADNQITTIEPPSKQELTEFWGSLWSEPKTHNEDAPWIREEEEKHQHIAEQGDVILSKEEIVETIKHTHGWKCPGVDNVQNFWYKHFSSTYEVLTNQINKAIRQPDRLPKFLTQGITYIKPKNADTKNPANYRPITCLPTLYKIITATLCRRIEQHLTQNNILTEEQKGCRKQSQGCKEQLIIDSVIMEQTRKEHRNLHTCFIDYKKAFDSVPHSWLTKILQIYKINPGLRQFLAKTMKTWRTNIHLTTQDGHIQTEELHIRRGIFQGDSLSSLWFCLCLNPLSNALNNTNYGFNIRNQKVNQHRINHLLYMDDIKLYAATDVQLRELLRITEVYTSDVRMEFGMNKCKVLHINKGQWKSHPEQEIVTGQTLDNMDKEETYKYLGFNQSVKIDHTQIKAELRQVFRDRLIKLLKTKLNSRNLTKAINTFAIPILTYSFGIIKWSHTDIENIHILIRTELTKHRMSHPNACKERLTIDRTQGGRGITDIQSLRTRQIKTLRHFFQNKQTNLHRAIVKADKNYTPLNLSCPDHVADTHNPTQSQQEKISTWSQKPLHGKHRYRVTQDHINKKQSYTWLQDGQLFPETEGFMLAIQDQVIVTRNYKKYIIKDPSITDDNCRKCQQQKETIDHITSGCKTLAGTEYTARHNSAAKVIHQALATTNKLIENTDPYYNYTPTSVLENDQYKLYWDVQIHTDKTIPANRPDIVFQSKLDKVTYLIDIAIPNDVNIQNTYAGKISKYTDLAMEIKRLWKQDKVTIVPLIMSVSGLTPNTFTPHLQQLGLDEKLHKTFQKSVILKTCNIVRSFLNSDQ

SEQ ID NO: 32312 - protein, 761 aa, Callosobruchus maculatus
MEQGDVILTPEEIAETIKHTHNWKCPGVDNIQNFWYKQFSSTYEVLTDQINKAILQPNRLPKFLTQGITYIKPKNTDTKNPANYRPITCLPTLYKIITATICRRIEQHLTQNNILTEEQKGCRKQSQGCKEQLIIDSVIMEQTRKEHRNLHTCFIDYKKAFDSVPHSWLKKTLQIYKINSGLRQFLTRIMETWRTNIHLKTQHGHIQTDELHIRRGIFQGDSLSSLWFCLCLNPLSNALNNTNCGFNIRHEKVNQHKINHLLYMDDIKLYAATEVQLREFLRITKVCTSDVRMEFGMSKCKVLHINKGQWKSHQERETLTGQTLDNMDKGETYKYLGFNQSVKIDHSQVKEQLIQEFRDRLIKLLKTKLNSRNLTKAINTFAIPVITYSFGIIKWSHTDIENIQILIRTELTRHRMSHPNACKERLTIDRKQGGRGIIDIQSLRTKQIKTLRHFFQSKQTNLHRAIVKADKNYTPLTLSSPNHAADTHNPIELQQEKINTWSQKALHGKHRYRITQDHINEKQSYTWLQDGQLFPETEGFMLAIQDQVIATRNYKKYIIKDPSVTNDNCRKCHQQKETIDHITSACKTLAGTEYTARHNSAAKIIHQALATTNKLIENTAPYYNYTPTSVLDNNQYKLYWDVEIHTDKTIPANRPDIVFQSKADKVTYLIDIAIPNDTNVQTAYAGKISKYTDLAIEVKRLWKQNKVVIVPLIMSVSGLTPNTFTPHLQQLGLDEKLHKIFQKSVILKTCNIVRSFLNSDQ

SEQ ID NO: 32313 - protein, 1245 aa, Callosobruchus maculatus
MHRVTSKNNQRRPRVRRLNSPEPQTQTEQPIERNPAADVLPAQPATTKAGKPRQRLQWTTEMNKSVMHCYYTATRLETISTGYRHELHRLFIAQYPHLAERVTEQRLIDQKRVITKNNRLTPEELQAIKILVSNEVNTVRQNDPQTSNTTTSDNTTIPTEIDPEHEHTQDRPDTAVQPNDSLAIESITEGHTSHTRNNQPPNKDTTKDTSIHLEIDPEHDHAPHTPETTCSNLPSTATQSQNITLPPAITQSAKQVMNTQYNKWCGTNPVLRDPLPRLIFKNNTRQILHTINANIIPQFLTNDSDLEDIHTVIYAAAATTLIVNGQKLPKRSKNHTSKRSKPKWQIRIENKISTLRKDLAHVTQYTNNNNLSKRIQTTINRLKSKSPQQTIPEIADTLKQKLAVYAARLRRYNESNDRKDANNLFQKSEKQFYQKMTSNNQITTTEPPSRQELTEFWGSLWSEPKTHNENAPWIRREEEKHQHIAEQGDVVFTPDEIAETIKHTHNWKCPGVDNVQNFWYKQFSATYEMLTEQINKAILQPNRLPKFLTQGITYIEPKNGDTRNPANYRSITCLPTLYKIITATIGKRIEQHLTQNNILTEEQKGCRKQSQGCKEQLIIDSVIMEQTRKEHRNLHTCFIDYKKAFDSVPHSWLTKTLQIYKINPVLRQFLTRTIETWRTNIHLKTQDGHIQTEELLIRRGIFQGDSLSSLWFCLCLNPLSNALNNTNYGFNIRHQKVNQHRINHLLYMDDIKLYAATEVQLKELLRITEVCTSDVRMEFGMSKCKVLHINKGQWKNQSEQEILTDETLDNMDKDETYKYLGFNQNIKIDHTQAKAQLTQEFRNRLLKLLKSKLNSKNLTKAINTFAIPVLTYSFGIIKWSHTDIENIHILIRTELTKHRMSHPNACKERLTIDRKQGGRGIIDIQSLHTRQIKTLRDFFQSKQTNLHRSIVKADKNYTPLNLSRSDHSADGHNHIELQQEKINTWSQKALHGKHRYRVTQEHINERQSYTWLQDGQLFPETEGFMLAIQDQVIATRNYMKYIIKDTSITDDNCRKCHQQKETIDHITSGCKTLAGTEYTARHNSAAKVVHQALATTNKLIENTDPYYNYTPTSVLENNEYKLYWDVEIHTDKTIPANRPDIVFQSKADKVTYLIDIAIPNDTNIQNAYAGKISKYTDLAIEIKRLWKQNKVTIVPLIMSVSGLTPNTFTPHLQQLGLDEKLHKIFQKSVILKTCNIVRSFLNSDP

SEQ ID NO: 32314 - protein, 1245 aa, Callosobruchus maculatus
MHKVTSKNNQRRPRVRRLNSPEPQTHAEQPREHNPAADVLPAQPATTKAGKPRQRLQWTTEINKHVMHCYYTATKLETISTGYRHELHRLFIAQYPHLAERVTEQRLIDQKRVITKNNRLTPEELQAIKILVSNEINRAHPNHTQTSNKTTSDSTSIHSETDPEHEHTQHVPDTAVQPNDSLATELITERHAIRTRNNQPPDTGMTNNTSIHLELDLENDHTPDTPETTRTNLPATITQSQNVTIPPAITQSAEQVMNTQYNKWCGTNPTLRDPLPRLIFKNNTLQILHTINVNIIPQFLTKDSDLEDIHTVIYAAAATTLTLNGQKIPKRSIAPTTERSKPKWQIRIENKISTIRKDLAHLAQYTNNNNRSKRIQTTINILKSKSPQQTISEIADTLKQKLAVYAARLRRYNESNARKDANNLFQKSEKQFYQKITADNQITAIEPPSKQELTEFWGSLWSEPKTHNENAPWIRQEEEKHQHIVEQGDVILTPEEIAETIKHTHNWKCPGVDNVQNFWYKQFSATYEMLTDQINKAILQPNRLPKFLTQGITYIKPKNADTKNPANYRPITCLPTLYKIITATICRKIEQHLTQNNILTEEQKGCRKHSQGCKEQLIIDSVIMEQTRKEHRNLHTCFIDYKKAFDSVPHSWLAKTLQIYKINPGLRQFLTRTMETWRTNIHLKTQDGHIKTDELHIRRGIFQGDSLSSLWFCLCLNPLSNALNNTNCGFNIRHERLNQHKINHLLYMDDIKLYAANEVQLRELIRITEVCSSDVRMEFGMSKCKVLHINKGQWKNHPEQETATGQTLNNMNKDETYKYLGFNQNVKIDHTKVKAQLTQEFRDRLIKLLKTKLNSRNLTKAINTFAIPVLTYSFGIIKWSHTDIENIHILIRTELTKHRMSHPNACKERLTIDRKQGGRGIVDIQSLRTRQIKTLRHFFQNKQTNLHRAIVKADRNYTPLNLSCPDHAADTHNPTQSQQEKINTWSQKPLHGKHRYRITQDHINEKQSYTWLQDGQLFPETEGFMLAIQDQVIATRNYKKYIIKDPSITEDSCRKCHQQKETIDHITSGCKVLAGTEYTARHNSAAKVIHQALATANKLIENTDPYYNYTPTSVLENDRYKLYWDVEIHTDKTIPANRPDIVFQSKADKITYLIDIAIPNDVNVQNTYAGKISKYTDLAMEIKRLWKQNKVTIVPLIMSVSGLTPNTFTQHLQQLGLDEKLHKVFQKSVILKTCNIVRSFLNSDQ

SEQ ID NO: 32315 - protein, 921 aa, Callosobruchus maculatus
MNAQFNKWCGTNPALRDPLPRLIFNSNTQKILHTINTNVIPQFLTSGSNLEHIHTVIYAAAAATLIVNGQKLPKRSNNHTSKRSKPKWQMRIENKITTIRKELAHLAQYTNNNNRSKRIQTTIDILKFKSPQKSIPEITDTLKQKLAVYAARLRRYNESNDRKDANNLFQKSEKQFYKKITTDNQITAVELPSKQELTEFCGSLWSEPKTPNESAPWIRQEEEKHQHIVEQGNVILTPEEIAETIKHTHNWKCPGVDNIQNFWYKQFSSVYEVLTDQINKAILQPNRLPKFLTQGITYIKPKNADTKNPANYRPITCLPTLYKIITATICRRIEKHLTENSILTEEQKGCRKQSQGCKEQLIIDSVIMEQTRKEHRNLHTCFIDYKKAFDSVPHSWLTKTLQIYKINPGLRQFLTRTMETWRTNIHLQTEDGHIQTDELHIRRGIFQGDSLSSLWFCLCLNPLSNTLNSTNCGFTIRHQKANQHKINHLLYMDDLKLYAATEVQLRELLRITEACTSDIKMEFGMSKCKVLHINKGQWKNHPEQEVVTGQALDNMDKDETYKYLGINQNAKIDHTKIKSQLTQEFKDRLIRLLKTKLNSRNLTKAINTFAIPILTYSFGIIKWSHTDIENIHILIRTELTKHRLSHPKACKERLTIDRKQWGRGIIDIQSLHAKQIKSLRHFFHSKQTNLHKAIVKADKNYTPLALSCPDHAADAHNHTQAQQEKINTWSQKALHGKHRYRVSQDYINEKQSYTWLQDGQLFPETEGFMLAIQDQVIATRNYRKYIMKDPSISDDNCRKCHQQKETIEHITSGCKTLAGTEYTARHNSAAKVIHQALATTNKLIENTDPYYNYTPTSVLENNQFKLYWDIEIHTDKTIPANRPDIVFQSKTDKVTYLIDIAIPNDIVTTASFSSPRESNST

SEQ ID NO: 32316 - protein, 1209 aa, Callosobruchus maculatus
MDRVNFMNNQRRPRVRRLNSPEPQTQTEQPIEHNPAADVLPTQPTTTKAGKPRPRLQWTTEMNKSVMRCYYTATKLETISTGYRHELHRLFKTQYPHLSTRVTEQRLIDQKRVITKNNRLTPQELQDIKNLVSNEMNIVQPNDSLTTGQIVETQNSDTQTSQTSNTAKTNNTSIHSQLGPEYDQALDTPDTTITNLPSTIIQIQNITRPFAVTQSVEQVMSTQYNKWCGTNPALRDPLPRLIFKNNTQQILHTVNANVIPQFIRDDSNLEDIHTVIYAAAATTLIVNGQKLSKRSKHQTSNRTKPKWQIRIENKISTIRKDLAHLAQYTINNNHPSRHIQRTINILKSKSPQQTIPEITDTLKQKLAVYAARLRRYNESNARKDANSLFQKSEKQFYQKITADNQITTIEPPSKQELTEFWGSLWSEPKTHNEDAPWIREEEEKHQHIAEQGDVILSKEEIVETIKHTHDWKCPGVDNVQNFWYKHFSSTYEVLTNQINKAIRQPDRLPKFLTQGITYIKPKNADTKNPANYRPITCLPTLYKIITATLCRRIEQHLTQNNILTEEQKGCRKQSQGCKEQLIIDSVIMEQTRKDHRNLHTCFIDYKKAFDSVPHSWLTKILQIYKINPGLRQFLAKTMKTWRTNIHLTTQDGHIQTEELHIRRGIFQGDSLSSLWFCLCLNPLSNALNNTNHGFNIRHQKVNQHRINHLLYMDDIKLYAATDVQLRELLRITEVYTSDVRMEFGTNKCKVLHINKGQWKNHPEQEIVTGQTLDNMDKEETYKYLGFNQSVKIDHTQIKAELRQVFRDRLIKLLKTKLNSRNLTKAINTFAIPILTYSFGIIKWSHTDIENIHILIRTELTKHRMSHPNACKERLTIDRTQGGRGIIDIQSLRTRQIKTLRHFFQNKQTNLHRAIVKADKNYTPLNLSCPDHVADTHNPTQSQQEKITTWSQKPLHGKHRYRVTQDHINKKQSYTWLQDGQLFPETEGFMLAIQDQVIATRNYKKYIIKDPSITDDNCRKCQQQKETIDHITSGCKRLAGTEYTARHNSAAKVIHQALATTNKLIENTDPYYNYTPTSVLENDQYKLYWDVQIHTDKTIPANRPDIVFQSKLDNVTYLIDIAIPNDVNIRNTYAGKISKYTDLAMEIKRLWKQDKVTIVPLIMSISGLTPNTFTPHLQQLGLDEKLHKTFQKSIILKTCNIVPSFLNSDQ

SEQ ID NO: 32317 - protein, 1207 aa, Callosobruchus maculatus
MDKVSFSNNQRRPRVRRLNSPEPQSQTQQPIAHNPTADVLPVQPATTKAGKPRQRLQWTTEMNKSVMHYYYTATRLETISTGYRHELYRLFTAQYPHLSTRVTEQRLIDQKRVITKNNRLTPQELQAIKSLVSNEINTVTPNDSLADESITERQNNHTGSNQTPNTDTTNNTSTHLDVESEHEHIPDTPDQTSINLPSTATQSQNVTPPPCITQSTEQVMNTQYNKWCGTNPTLRDPLPRLIFKNNTRQILQTVNSNIIPQFLTKDSNLEDIHTVIYAAAATILIVNGQKLPKRSKDHTSKRSKPKWQIRIENKISTIRKDLAHVSQYIHKNNLSKRIQTTISRLKSRSPQETISEINDTLKQKLAVYAARLRRYNESNDRKDTNNLFQKSERQFYQKITSNNQITIEPPSRKELTDFWGSLWSEPKTHNENAPWIRQEEEKQQHIPEQGDVILTPQEIAETIKHTHNWKCPGVDNVQNFWYKQFSATYEMLTDQINKAILQPNRLPKFLTQGVTYIKPKNADTKNPANYRPITCLPTLYKIITATIGKRIEQHLTQNNILTEEQKGCRKQSQGCKEQLIIDSVIMEQTRKEHRNLHTCFIDYKKAFDSVPHSWLTKTLQIYKINPTLRQFLTRIMETWRINVHLKTQDGHIQTEELYIRRGIFQGDSLSSLWFCLCLNPLSNALNNTNYGFNIRHQKVNQHRISHLLYMDDIKLYAATEVQLKELLKITEVCTSDVRMEFGMSKCKVLHIHKGQWKNHSEQEILTGETLDNMEKDETYKYLGFNQNIKIDHSEVKAQLTQEFRDCLITLLKTKLNSKNLKKAINTFAIPVLTYSFGIIKWSHTDIENINILIRTELTKHRMSHPKACKERLTIDRKHGGRGIIDIQSLHTRQIKTLRDFFQSKETNLHRSIVKADKNYTPLILSRPDHPADAHNHIELQQEKINTWSQKALHGKHRYRVTQDHINERQSYTWLQDGQLFPETEGFMLAIQDQVIATRNYMKYIIKDTSITDDNCRKCHQQKETIDHITSACKTLAGTEYTARHNSAAKVIHQALATTNKLIENTDPYYNYTPTSVLENNEYKLYWDVEIHTDKTIPANRPDIVFQSKADKVTYLIDIAIPNDTNIQNAYAGKISKYTDLAIEIKRLWKQNKVTIVPLIMSVSGLTPNPFTPHLQQLGLDERLHKIFQKSVILKTCNIVRSFLNSDP

SEQ ID NO: 32318 - protein, 1260 aa, Callosobruchus maculatus
MDKVNLIDNPRRPRVRRLNSPKSQTRTQQPIAHNPAADVLPTQPATTKAGKPRQRLQWTTEMNKFVMRCYYTATKLETISTGYRHELHRLFIAQYPHLAERVTEQRLIDQKRVITKNNRLTPQELQAVKTLVANEINTVHPIDSLVTESITETQNIHTRNNQTTNTATTNNISIQSEIDSEHEHTPNTPDITFTNLPATTTQSQQISQPPSVTQSAEAVNTAQPPSISGEPEQMTNSRTTQFNKRCNTTTQNQNQNIARSPSITQTAEQVMNTQFNKWWGTNPALRDPLPRLIFKNNTQQILHTINTNLIPQFITNNSNLEDIHTVIYAAAATTLIVNGQKLQKRSKDRRSNRAKPKWQIRIENKISTLRKDLAHLAQYSNNNNHPSKHIQRTINILKSKSPQKSIPEIADTLKQKLAVYAARLRRYNESNDRKDANNLFQKSEKQFYQKITSNNQITTIEPPSRQELTAFWRSLWSEPKTHNENAPWIRQEETKHQHITEQGNVILTTEEIAETIKHTHNWKCPGVDNVQNFWYKQFSSTYEMLTDQINKAILQPNRLPKFLTQGITYIKPKNADTKNPANYRPITCLPTLYKIITATICRRIEQHLMQNNILTEEQKGCRKLSQGCKEQLIIDSVIMEQTRKEHRNLHTCFIDYKKAFDSVPHSWLMKTLQIYKINPGLRQFLKSTMETWRTNIHLQTHDGHIQTDELHIRRGIFQGDSLSSLWFCLCLNPLSNTLNSTNHGFNIRHHKADQHKINHLLYMDDIKLYAATEVQLRELLKITEVYTSDIRMEFGMSKCKVLHINKGQWKNQPEKEVVTGQPLDNMDKDETYKYLGFNQNVKIDHTQVKAQLTQEFKDRLIKLLKTKLNSKNLTKAINTFAIPVLTYSFGIIKWSHTDIENIHILIRTELTKHRMSHPNACKERLAIDRKLGGRGIIDIQSLRTTQIQTLRHFFHTKQTNLHKAIVKADKNYTPLNLSSPDHVADTYNHIQSQQEKINTWSQKALHGKHRYRVTQDHINQKQSYAWLQDGQLFPETEGFMLAIQDQVIATRNCKKYIIKDPSITDDNCRKCQQQKETIDHITSGCKTLAGTEYTARHNSAAKVIHQALATTNKLIENTDPYYNYTPTSVLENDQYKLYWDVEIHTDKTIPANRPDIVFQSKADKITYLIDIAIPNDVNIQNTYAGKISKYTDLAMEIKRLWKQNKVTIVPLIMSVSGLTPSTFTQHLQQLGLDEKLHKVFQKSVILKTCNIVRSFLNSDQ

SEQ ID NO: 32319 - protein, 988 aa, Callosobruchus maculatus
MNAQFNKWCGTNPALRDPLPRLIFNSNTQKILHTINTNVIPQFLTEDSNLEDIHTVIYAAAAATLIVNGQKLPKRSNSHRSKRSKPKWQMRIENKITTIRKELAHLAQYTNNNNRSKRIQTTIDILKSKSPQKSIPEITDTLKQKLAVYAARLRRYNESNDRKDANNLFQKSEKQFYKKITTDNQITAIELPNKQELTEFWGSLWSEPKTHNENAPWIRQEEEKHQHIAEQGDVILTPEEIAETIKHTHNWKCPGVDNIQNFWYKQFSSVYEVLTDQINKAILQPNRLPKFLTQGITYIKPKNADTKNPANYRPITCLPTLYKIITATICRRIEKHLTENSILTEEQKGCRKQSQGCKEQLIIDSVIMEQTRKEHRNLHTCFIDYKKAFDSVPHSWLTKTLQIYKINPGLRQFLTRTMETWRTNIHLQTEDGHIQTDELHIRRGIFQGDSLSSLWFCLCLNPLSNTLNSTNCGFTIRHQKANQHKINHLLYMDDLKLYAATEVQLRELLRITEVCTSDIKMEFGMSKCKVLHINKGQWKNHPEQEIVTGQALDNMDKNETYKYLGINQNAKIDHTKIKSQLTQEFKDRLIRLLKTKLNSRNLTKAINTFAIPIVTYSFGIIKWSHTDIENIHILIRTELTKHRMSHPKACKERLTIDRKQGGRGIIDIQSLHAKQIKSLRHFFHSKQTNLHKAIVKADKNYTPLALSCPDHAADAHNHIKAQQEKINTWSQKALHGKHRYRVTQDHINEKQSYTWLQDGQLFPETEGFMLAIQDQVIATRNYRKYIMKDPSISDDNCRKCHQQKETIEHITSGCKTLAGTEYTARHNSAAKVIHQALATTNKLIENTDPYYNYTPTSVLENNQFKLYWDIEIHTDKTIPANRPDIVFQSKTDKVTYLIDIAIPNDMNIQNTYAGKISKYTDLAIEIKRLWKQNKVVIVPLIMSVSGLTPNTFTPHLQQLGLDEKLHKTFQKSVILKTCSIVRSFLNSE

SEQ ID NO: 32320 - protein, 1209 aa, Callosobruchus maculatus
MDRVNFMNNQRRPRVRRLNSPEPQTQTEQPIEHNPAADVLPTQPATTKAGKPRQRLQWTTEMNKSVMRCYYTATKLETISTGYRHELHRLFTTQYPHLSTRVTEQRLIDQKRVITKNNRLTPQELQDIKNLVSNEMNIVQPNDSLTTEQIVETQNSDTQTSQTSNIAKTNNTSIHSELGPEHDQALDTPDTTTTNLPSTIIQIQNITRPFAVTQSVEQVMRTQYNKWCGTNPALRDPLPRLIFKNNTQQILHTVNANVIPQFIRDDSNLEDIHTVIYAAAATTLIVNGQKLSKRSKHQTSNRTKPKWQIRIENKISTIRKDLAHLAQYSINNNHPSRHIQRTINILKSKSPQQTIPEITDTLKQKLAVYAARLRRYNESNARKDANSLFQKSEKQFYQKITADNQITTIEPPSKQELTEFWGSLWSEPKTHNEDAPWIREEEEKHQHIAEQGDVVLSKEEIVETIKHTHDWKCPGVDNVQNFWYKHFSSTYQVLTNQINKAIRQPDRLPKFLTQGITYIKPKNADTKNPANYRPITCLPTLYKIITATLCRRIEQHLTQNNILTEEQKGCRKQSQGCKEQLIIDSVIMEQTRKEHRNLHTCFIDYKKAFDSVPHSWLTKILQIYKINPGLRQFLAKTMKTWRTNIHLTTQDGHIQTEELHIRRGIFQGDSLSSLWFCLCLNPLSNALNNTNYGFSIRHQKLNQHRINHLLYMDDIKLYAATDVQLRELLRITEVYTSDVRMEFGMNKCKVLHINKGQWKNHPEQEIVTGQTLDNMDKEETYKYLGFNQSVKIDHTQIKAELRQVFRDRLIKLLKTKLNSRNLTKAINTFAIPILTYSFGIIKWSHTDIENIHILIRTELTKHRMSHPNACKERLTIDRTQGGRGITDIQSLRTRQIKTLRHFFQNKQTNLHLAIVKADKNYTPLNLSCPDHVADTHNPTQSQQEKISTWSQKPLHGKHRYRVTQDHINKKQSYTWLQDGQLFPETEGFMLAIQDQVIATRNYKKYIIKDPSITDDNCRRCQQQKETIDHITSGCKTLAGTEYTARHNSAVKVIHQALATTNKLIENTDPYYNYTPTSVLENDQYKLYWDVQIHTDKTIPANRPDIVFQSKLDKVTYLIDIAIPNDVNIQNTYAGKISKYTDLAMEIKRLWKQDKVTIVPLIMSVSGLTPNTFTPHLQQLGLDEKLHKTFQKSVILKTCNIVRSFLNADQ

SEQ ID NO: 32321 - protein, 1209 aa, Callosobruchus maculatus
MDRVNFMNNQRRPRVRRLNSPEPQTQTEQPIEHNPAADVLPAQPATTKAGKPRQRLQWTREMNKSVMRCYYTATKLETISTGYRHELHRLFTTQYPHLSTRVTEQRLIDQKRVITKNNRLTPQELQDIKNLVSNEMNTVQPNDSLTTEQIVETQNSDTQTSQTSNTAKTNNTSIHSELGPEHDQALDTRDTTITNLPSTIIQIQNITRPFAVTQSVEQVMSTQYNKWCGTNPALRDPLPRLIFKNNTQQILHTVNANVIPQFIRDDSNLEDIHTVIYAAAATTLIVNGQKLSKRSKHQTSNRTKPKWQIRIENKISTIRKDLAHLAQYTINNNHPSRHIQRTINILKSKSPQQTIPEITDTLKQKLAVYAARLRRYNESNARKDANSLFQKSEKQFYQKITADNQITTIEPPSKQELTEFWGSLWSEPKAHNEDAPWIREEEEKHQHIAEQGDVILSKEEIVETIKHTHDWKCPGVDNVQNFWYKHFSSTYEVLTNQINKAIRQPDRLPKFLTQGITYIKPKNADTKNPANYRPITCLPTLYKIITATLCRRIEQHLTQNNILTEEQKGCRKQSQGCKEQLIIDSVIMEQTRKEHRNLHTCFIDYKKAFDSVPHSWLTKILQIYKINPGLRQFLEKTMKTWQTNIHLTTQDGHIQTEGLHIRRGIFQGDSLSSLWFCLCLNPLSNALNNTNYGFNIRHQKVNQHRINHLLYMDDIRLYAATDVQLRELLRITEVYTSDVRMEFGMNKCKVLHINKGQWKNHPEQEIVTGQTLDNMDKEETYKYLGFNQSVKIDHTQIKAELRQVFRDRLIKLLKTKLNSRNLTKAINTFAIPILTYSFGIIKWSHTDIENIHILIRTELTKHRMSHPNACKERLTIDRTQGGRGITDIQSLHTRQIKTLRHFFQNKQTNLHRAIVKADKNYTPLNLSCPDHVADTHNPTQSQQEKISTWSQKPLHGKHRYRVTQEHINKKQSYTWLQDGQLFPETEGFMLAIQDQVIATRNYKKYIIKDPSITDDNCRKCQQQKETIDHITSGCKTLAGTEYTARHNSAAKVIHQALATTNKLIENTDPYYNYTPTSVLENDQYKLYWDVQIHTDKTIPANTPDIVFQSKLDKVTYLIDIAIPNDVNIQNTYAGKISKYTDLAMEIKRLWKQDKVTIVPLITSVSGLTPNTFTPHLQQLGLDEKLHKTFQKSVILKTCNIVRSFLNSDQ

SEQ ID NO: 32322 - protein, 1209 aa, Callosobruchus maculatus
MDRVNFMNNQRRPRVRRLNSPEPQTQTEQPIEHNPAADVLPTQPATTKAGKPRQRLQWTTEMNKSVMRCYYTATKLETISTGYRHELHRLFTTQYPHLSTRVTEQRLIDQKRVITKNNRLTPQELQDIKNLVSNEMNIVQPNDSLTTEQIVETQNSDTQTSQISNTAKTNNTSIHSELGPEHDQALDTPDTTITNPPSTIIQIQNVTRPFAVTQSVEQVMSTQYNKWCGTNPALRDPLPRLIFKNNTQQILHTVNANVIPQFIRDDSNLEDIHTVIYAAAATTLIVNGQKLSKRSKHQTSNRTKPKWQIRIENKISTIRKDLAHLAQYTINNNHPSRHIQRTINILKSKSPQQTIPEITDTLKQKLAVYAARLRRYNESNARKDANSLFQKSEKQFYQKITADNQIATIEPPSKQELTEFWGSLWSEPKTHNEDAPWIREEEEKYQHIAEQGDVILSKEEIVATIKHTHDWKCPGVDNVQNFWYKHFSSTYEVLTNQINKAIRQPDRLPKFLTQGLTYIKPKNADTKNPANYRPITCLPTLYKIITATLCRRIEQHITQNNILTEEQKGCRKQSQGCKEQLIIDSVIMEQTRKEHRNLHTCFIDYKKAFDSVPHSWLTKILQIYKINPGLRQFLAKTMKTWRTNIHLTTQDGNIQTEELHIRRGIFQGDSLSSLWFCLCLNPLSNALNNTNYGFNIRHQKVNQHRINHLLYMDDIKLYAATDVQLRELLRITEVYTSDVRMEFGMNKCKVLHINKGQWKNHPEQEIVTGQTLDNMDKEETYKYLGFNQSVKIDHTQIKAELRQVFRDRLIKLLKTKLNSRNLTKAINTFAIPILTYSFGIIKWSHTDIENIHILIRTELTKHRMSHPNACKERLTIDRTQGGRGITDIQSLRTRQIKTLRHFFQNKQTNLHRAIVKADKNYTPLNLSCPDHVADTHNPTQSQQEKISTWSQKPLHGKHRYRVTQDHINRKQSYTWLQDGQLFPETEGFMLAIQDQVIATRNYKKHIIKDPSITDDNCRKCQQQKETIDHITSGCKTLAGTEYTGRHNSAAKVIHQALATTNKLIENTDPYYNYTPTSVLENDQYKLYWDVQIHTDKTIPANKPDIVFQSKLDKVTYLIDIAIPSDVNIQNTYAGKISKYTDLAMEIKRLWKQDKVTIVPLIMSVSGLTPNTFTPHLQQLGLDEKLHKTFQKSVILKTCNIVRSFLNSDQ

SEQ ID NO: 32323 - protein, 1062 aa, Callosobruchus maculatus
MNTVQPNDSLTTEQIVETQNSDTQTSQTSNTAKTNNTSIHSELGPEHDQALDTPDTTITNLPSTIIQIQNITRPFAVTQSVEQVMSTQYNKWCGTNPALRDPLPRLIFKNNTQQILHTVNANVIPQFMRDDSNLEDIHTVIYAAAATTLIVNGQKLSKRSKHQTSNRTKPKWQIRIENKISTIRKDLAHLAQYTINNNHPSRHIQRTINILKSKSPQQTIPEITDTLKQKLAVYAARLRRYNESNARKDANSLFQKSEKQFYQKITADNQITTIEPPSKQELTEFWGSLWSEPKTHNEDAPWIREEEEKHQHIAEQGDVILSKEEIVETIKHTHDWKCPGVDNVQNFWYKHFSSTYEVLTNQINKAIRQPDRLPKFLTQGITYIKPKNADTKNPANYRPITCLPTLYKIITATLCRRIEQHLTQNNILTEEQKGCRKQSQGCKEQLIVDSVIMEQTRKEHRNLHTCFIDYKKAFDSVPHSWLTKILQIYKINPGLRQFLAKTMKTWRTTIHLTTQDGHIQTEELHIRRGIFQGDSLSSLWFCLCLNPLSNALNNTNYGFNIRHQKVNQHRINHLLYMDDIKLYAATDVQLRELLRITEVCTSDVRMEFGMNKCKVLHINKGQWKNHPEQEIVTGQTLDNMDKEETYKYLGFNQSVKIDHTQIKAELRQVFRDRLVKLLKTKLNSRNLTKAINTFAIPILTYSFGIIKWSHTDIENIHILIRTELTKHRMSHPNACKERLTIDRTQGGRGITDIQSLRTRQIKTLRHFFQNKQTNLHRAIVKADKNYTPLNLSCPDHVADTHNPTQSQQEKISTWSQKPLHGKHRYRVTQDHINKKQSYTWLQDGQLFPETEGFMLAIQDQVIATRHYKKYIIKDPSITDDNCRKCQQQKETIDHITSGCKTLAGTEYTARHNSAAKVIHQALATTNKLIENTDPYYNYTPTSVLENDQYKLYWDVQIHTDKTIPANRPDIVFQSKLDKVTYLIDIAIPNDVNIQNTYAGKISKYTDLAMEIKRLWKQDKVTIVPHYFSLRPYTKHIYTTPTTVRPGRKVTQNIPKVCNSEDL

SEQ ID NO: 32324 - protein, 1228 aa, Callosobruchus maculatus
MHKVTSKNNQRRPRVRRLNSPEPQVQTEQPIERNPAADVLPAQLATTKAGKPRQRLQWTTEINKSVMHCYYTATKLETISTGYRHELHRLFIAQYPHLAERVTEQRLIDQKRVITKNNRLTPEELQAIKLLVSNEMNTAHLNDPQTSNTNTTDNTSIHLEVDPEHEHTQDIPDTAVQPNVSLAIETITEGHAIHSRNNQPPNKDTTNNTSIHLEIDPGHDHTPETICTNLPSTTTRNQNITIPAATTQSAEQVMSTQYNKWYGTNPVLRDPLPRLIFKNNTRQILHTINANIIPQFLTNDSDLEDIHTVIYAAAATTLIVNGQKLPKRSKNHTSKRSKLRKDLAHLTQYTNNNNLSKRIQTTINRLKSKSPQQTIPEIADTLKQKLAVYAARLRRYNESNDRKDANNLFQKSEKQFYQKITSTTQITTIEPPTRQELTEFWGSLWSEPKTHNDNAPWIRQEEEKQQHIPEQGDVILTPQEIAETIKHTHNWKCPGVDNVQNFWYKQFTATYEVLTNQINKALLQPNRLPKFLTQGITYIKPKNADTKNPANYRPITCLPTLYKIITATIGKRIEQHLTQNNILTEEQKGCRKQSQGCKEQLIIDSVIMEQTRKEHRNLHACFIDYKKAFDSVPHSWLKKTLEIYKINSGLRQFLTRTMETWRTNIYLQTEDGHIQTDELHIRRGIFQGDSLSSLWFCLCLNPLSNTLNDTNCGFTIRHQRVNLHKINHLLYMDDIKLYAATEVQLRELLRITEVCTSDMRMEFGMSKCKVLHINKGQWKNHPQQEVVTGQTLNNMDKDETYKYLGFNQNVKIDHTQVKAQLTREFKDRLTRLLKTKLNSRNITKAINTFAIPGLTYSFGIIKWSHTDIENIHILIRTEFTKHRMSHPNACKERLTIDREQGGRGIIDIHSLHTKQIKTLRYFFHSKQTNLHKAIVKADKNYTPLALSCPDHAADAHNHIQSQQEKINTWSQKALHGKHRYRVTQDHINRKQSYTWLQDGQLFPETEGFMLAIQDQVIATRNYKKYIIKDPSITDDSCRKCHQQKETIEHITSGCKTLAGTEYTARHNSAAKVIHQALATTNKLTKNTDPYYNYTPTSVLENNKFKLYWDIEIHTDKTIPANRPDIVFQSKVDKVTYLIDIAIPNDMNIQNTYTGKISKYTDLAIEIKRLWKQNKVIIVPLIMSVSGLTPNTFTPHLQQLGLDEKLHKTFQKSVILKTCSIVRSFLNSE

SEQ ID NO: 32325 - protein, 1074 aa, Callosobruchus maculatus
MNTVQPNDSLTTEQIVETQNSDTQTSQTSNTAKTNNTSIHSELGPEHDQALDTPDTTITNLPSTTIQIQNITRPFAVTQSVEQVMSTQYNKWCGTNPALRDPLPRLIFKNNTQQILHTVNANVIPQFMRDDSNLEDIHTVIYAAAATTLIVNGQKLSKRSKHQTSNRTKPKWQIRIENKISTIRKDLAHLAQYTINNNHPSRHIQRTINILKSKSPQQTIPEITDTLKQKLAVYAARLRRYNESNARKDANSLFQKSEKQFYQKITADNQITTIEPPSKQELTEFWGSLWSEPKTHNEDAPWIREEEEKHQHIAEQGDVILSKEEIVETIKHTHDWKCPGVDNVQNFWYKHFSSTYEVLTNQINKAIRQPDRLPKFLTQGITYIKPKNADTKNPANYRPITCLPTLYKIITATLCRRIEEHLTQNNILTEEQKGCRKQSQGCKEQLIIDSVIMEQTRKEHRNLHTCFIDYKKAFDSVPHSWLTKILQIYKINPGLRQFLAKTMKTWRTNIHLTTQDGHIQTEELHIRRGIFQGDSLSSLWFCLCLNPLSNALNNTNYGFNIRHQKVNQHRINHLLYMDDIKLYAATDVQLRELLRITEVYTSDVRMEFGMNKCKVLHINKGQWKNHPEQEIVTGQTLDNMDKEETYKYLGFNQSVKIDHTQIKAELRQVFRDRLIKLLKTKLNSRNLTKAINTFAIPILTYSFGIIKWSHTDIENIHILIRTELTKHRMSHPNACKERLTIDRTQGGRGITDIQSLRTRQIKTLRHFFQNKQTNLHRAIVKADKNYTPLNLSCPDHVADAHNPTQSQQEKISTWSQKPLHGKHRYRVTQDHINKKQSYTWLQDGQLFPETEGFMLAIQDQVIATRNYKKYVIKDPSITDDNCRKCQQQKETIDHITSGCKTLAGTEYTARHNSAAKVIHQALATTNKLIENTDPYYNYTPTSVLENDQYKLYWDVQIHTDKTIPANRPDIVFQSKLDKVTYLIDIAIPNDVNIQNTYAGKISKYTDLAMEIKRLWKQDKVNIVPLIMSVSGLTPNTFTPHLQQLGLDEKLHKTFQKSVILKTCNIVRSFLNSDQ

SEQ ID NO: 32326 - protein, 1208 aa, Callosobruchus maculatus
MDKVSFSNNQRRPRVRRLNSPEPQSQTQQPIAHNPTADVLPVQPATTKAGKPRQRLQWSTEMNKSVMHCYYTATRLETISTGYRHELYRLFTAQYPHLSTRVTEQRLIDQKRVITKNNRLTPQELQAIKSLVSNEINTVTPNDSLADGSITERQNNHTGSNQTPNTDTTNNTSIHLDVESEHEHIPNTPDQTSINLPSTATQSQNVTPPPCITQSTEQVMNTQYNKWCGTNPTLRDPLPRLIFKNNTRQILQTVNSNIIPQFLTKDSNLEDIHTVIYAAATTTLIVNGQKPPKRSKDHTSKRSKPKWQIRIENKISTIRKDLAHVTQYIHKNNLSKRIQTTISRLKSRSPQQTISEIYDTLKQKLAVYAARLRRYNESNDRKDTNNLFQKSERQFYQKITSNNQITTIEPPSRKELTDFWGSLWSEPKTHNENAPWIRQEEEKQQHIPEQGDVILTPQEIAETIKHTHNWKCPGVDNVQNFWYKQFSATYEMLTDQINKAILQPNRLPKFLTQGVTYIKPKNADTKNPANYRPITCLPTLYKIITATIGKRIEQHLTQNNILTEEQKGCRKQSQGCKEQLIIDSVIMGQTRKEHRNLHTCFIDYKKAFDSVPHSWLTKTLQIYKINPTLRQFLTRIMETWRTNIYLKTQDGHIQTEELYIRRGIFQGDSLSSLWFCLCLNPLSNALNNTNYGFNIRHQKVNQHRISHLLYMDDIKLYAATEVQLKELLKITEVCTSDVRMEFGMSKCKVLHIHKGQWKNHSEQEILTGETLDNMEKDETYKYLGFNQNIKIDHSEVKAQLTQEFRDRLITLLKTKLNSKNLTKAINTSAIPALTYSFGIIKWSHTDIENINILIRTELTKHRMSHPKACKERLTIDRKHGGRGIIDIQSLHTRQIKTLRDFFQSKETNLHRSIVKADKNYTPLTLSRPDHPADAHNHIELQQEKINTWSQKALHGKHRYRVTQDHINERQSYTWLQDGQLFPETEGFMLAIQDQVIATRNYMKYIIKDTSITDDNCRKCHQQKETIDHITSACKTLAGTEYTARHNSAAKVIHQALATTNKLIENTDPYYNYTPTSVLENNEYKLYWDVEIHTDKTIPANRPDIVFQSKADKVTYLIDIAIPNDTNIQNAYAGKISKYTDLAIEIKRLWKQNKVTIVPLIMSVSGLTPNTFTPHLQQLGLDERLHKIFQKSVILKTCNIVRSFLNSDP

SEQ ID NO: 32327 - protein, 1173 aa, Callosobruchus maculatus
MHRVTSKNNQRRPRVRRLNSPEPQTQTEEPIERNPAADVLPAQPATTKAGKPRQRLQWTTEMNKSVMHCYYTATRLETISTGYRHELHRLFIAQYPHLAERVTEQRLIDQKRVITKNNRLTTEELQAIKILVSNEVNTVRQNDPQTSNTTTSNNTTIPTEIDPEHEHTQDRPDTAVQPNDSLAIESITEGHTIHTRNNQPPNKDTTKDTSIHLEIDPEHDHAPHTPETTCSNLPSTATQSQNITLQPAITQSAKQVMNTQYNKWCGTNPVLRDPLPRLIFKNNTRQILHTINANIIPQFLTNDSDLEDIHTVIYAAAATTLIVNGQKLPKRSKNHTSKRSKPKWQIRIENKISTLRKDLAHVTQYTNNNNLSKRIQTTINRLKSKSPQQTIPEIADTLKQKLAVYAARLRRYNESNDRKDANNLFQKSEKQFYQKMTSNNQITTTEPPSRQELTEFWGSLWSEPKTHNENAPWIRQEEEKHQHIAEQGDVVFTPDEIAETIKHTHNWKCPGVDNVQNFWYKQFSATYEMLTEQINKAILQPNRLPKFLTQGITYIKPKSGDTRNPANYRPITCLPTLYKIITATIGKRIEQHLTQNNILTEEQKGCRKQSQGCKEQLIIDSVIMEQTRKEHRNLHTCFIDYKKAFDSVPHSWLTKTLQIYKINPVLRQFLTRTMETWRTNIHLKTQDGHIQTEELLIRRGIFQGDSLSSLWFCLCLNPLSNALNNTNYGFNIRHQKVNQHRINHLLYMDDIKLYAATEVQLKELLRITEVCTSDVRMEFGMSKCKVLHINKGQWKNQSEQEILTGETLDNMDKDETYKYLGFNQNIKIDHTQAKAQLTQEFRNRLLKLLKSKLNSKNLTKAINTFAIPVLTYSFGIIKWSHTDIENIHILIRTELTKHRMSHPNACKERLTIDRKQGGRGIIHIQSLHTRQIKTLRDFFQSKQTNLHRSIVKADKNYTPLNLSRSDHSADGHNHIELQQEKINTWSQKALHGKHRYRVTQEHINERQSYTWLQDGQLFPETEGFMLAIQDQVIATRNYMKYIIKDTSITDDNCRKCHQQKETIDHITSGCKTLAGTEYTARHNSAAKVIHQALATTNKLIENTDPYYNYTPTSVLENNEYKLYWDVEVHTDKTIPANRPDIVFPVEGRQSYLFDRYRYSQRYEYPKRLRWEDI

SEQ ID NO: 32328 - protein, 1002 aa, Callosobruchus maculatus
MEQQPGVSEPGLHFFVLNIIIIIIIAITQSAEHVMNTQYNKWCGTNPTLRDPLPRLIFKNNTLQILHTINDNIIPQFLTKDSDLEDIHTVIYAAAATTLTLNGQKLPERSIARTTERSKPKWQIRIENKISTIRKDLAHLAQYTNNNNRSKRVQTTINILKSKSPQQTIPEIVDTLKQKLAVYAARLRRYNESNARKDANNLFQKSEKQFYQKITADNQITAIEPPSKQELTEFWGSLWSEPKTHNENAPWIRQEEEKHQHIVEQRDVILTPEEIAETIKHTHNWKCPGVDNVQNFWYKQFSATYEMLTDQINKAILQPNRLPKFLTQGITYIKPKNADTKNPANYRPITCLPTLYKIITATICRRLQGCKEQLIIDSVIMEQTRKEHRNLHTCFIDYKKAFDSVPHSWLAKTLQIYKINPGLRQFLTRTMETWRTNIHLKTQDGHIKTDELHIRRGIFQGDSLSALWFCLCLNPLSNALNNTNCGFNIRHERLNQHKINHLLYMDDTKLYAANKVQLRELIRITEVCSSDVKMEFGMSKCKVLHINKGQWKDHPEQETVTGQTLNSMDKNETYKYLGFNQNVKIDHTKVKAQLTQEFRDRLIKLLKTKLNSRNLTKAINTFAIPVLTYSFGIIKWSHTDIENIHILIRTELTKHRMSHPNACKERLTIDRKQGGRGIIDIQSLRTRQIKILRHFFQNKQTNLHRAIVKADKNYTPLNLSCPDHAADTHTPTQSQQEKINTWSQKPLHGKHRYRITQDHINEKQSYTWLQDGQLFPETEGFMLAIQDHVIATRNYKKYIIKDPSITEDNCRKCHQQKETIDHITSGCKTLAGIEYTARHNCAAKIIHQALATVNKMIDNTDPYYNYTPTSVLENDRYKLYWDVEIHTDKTIPANRPDIVFQSKADKVAYLIDIAIPNDTNVQTTYAGKISKYTDLAIEVKRLWKQDKVVIVPLIMSVSGLTPNTFTPHLHQLGLDEKLHKTFQKSVILKTCNIVRSFLNSDQ

SEQ ID NO: 32329 - protein, 1208 aa, Callosobruchus maculatus
MDKVSFSNNQRRPRVRRLNSPEPQNQIQQPTAHNPTADVLPVQPATTKAGKPRQRLQWTTEMNKSVMHCYYTATKLETISTGYRHELYRLFTAQYPHLSTRVTEQRLIDQKRVITKNNRLTPQELQAIKSLVSNEINTVTPNDSLADESITERQNSHTRSNQTPNTDTTNNTSIHLDVDSEHEHTPDTPNQTSINLPSTATQSQNVTPPPCITQSTEQVMNTQYNKWCGTNPTLRDPLPRLIFKNNTRQILQTVNSNIIPQFLTKDSNLEDIHTVIYAAAATTLIVNGQKLPKRSKDHTSRRSKPKWQIRIENKISTIRKDLAHVTQYIHKNNLSKRIQTTINRLKSRSPQQTISEIYDTLKQKLAVYAARLRRYNESNDRKDTNNLFQKSERQFYQKITSSNQITTIEPPSRKELTDFWGSLWSEPKTHNENAPWIRQEEEKQQHIPEQGDVILTPQEIAETIKHTHNWKCQGVDNVQNFWYKQFSTTYETLTDQINKAILQPNRLPKFLTQGVTYIKPKNADTKNPANYRPITCLPTLYKIITATIGKRIEQHLTQNNILTEEQKGCRKQSQGCKEQLIIDSVIMEQTRKEHRNLHTCFIDYKKAFDSVPHSWLTKTLQIYKINPTLRQFLTRTMETWRTNIHLKTQDGHIQTEELCIRRGIFQGDSLSSLWFCLCLNPLSNALNNTNYGFNIRHQKVNQHRISHLLYMDDIKLYAATEVQLKELLKITEVCTSDVRMEFGMSKCKVLHIHKGQWKNHSEQEILTGQTLDNMEKDETYKYLGFNQNIKIDHSEVKAQLTQEFRDRLITLLKTKLNSKNLTKAINTFAIPVLTYSFGIIKWSHTDIENINILIRTELTKHRMSHPKACKERLTIDRKHGGRGIIDIQSLHTRQIKTLRDFFQSKETTLHRSIVKADKNYTPLTLSRPDHPADAHNHIELQQEKINTWSQKALHGKHRYRVTQDHINERQSYAWLQDGQLFPETEGFMLAIQDQVIATRNYMKYIIKDTSITDDNCRKCHQQKETIDHITSACKTLAGTEYTARHNSAAKVIHQALATTNKLIENTDPYYNYTPTSVLENNEYKLYWDVEIHTDKTIPANRPDIVFQSKADKVTYLIDIAIPNDTNIQNAYAGKISKYTDLAIEIKRLWKQNKVTIVPLIMSVSGLTPNTFTPHLQQLGLDERLHKIFQKSVILKTCNIVRSFLNSDP

SEQ ID NO: 32330 - protein, 1163 aa, Callosobruchus maculatus
MNWNKNGCAPFIWPNTGGPDSLTNIIIIIIVITKNNRLTPEELQAIKILVSNEVNTVRQNDPQTSNTTTSDNTTIPTEIDPEQEHTQDRPDTAVQPNDSLAIESITEGHTIHTRNNQPPNKDTTNDTSIHLEIDPEHDHAPHTPETTCSNLPSTATQSQNITLPPAITQSAKQVMNTQYNKWCGTNPVLRDPLPRLIFKNNTRQILHTINANIIPQFLTNDSDLEDIHTVIYATAATTLIVNGQKLPKRSKNHTSKRSKPKWQIRIENKISTLRKDLAHVTQYTNNNNLSKRIQTTINRLKSKSPQQTIPEIADTLKQKLAVYAARLRRYNESNDRKDANNLFQKSEKQFYQKMTSNNQITTTEPTSRQGLTEFWGSLWSEPKTHNENAPWIRQEEEKHQHIAEQADVVFTPDEIAETIKHTHNWKCPGVDNVQNFWYKQFSATYEMLTEQINKAILQPNRLPKFLTQGITYIKPKNGDTRNPANYRPITCLPTLYKIITATIGKRIEQHLTQNNILTEEQKGCRKQSQGCKEQLIIDSVIMEQTRKEHRNLHTCFIDYKKAFDSVPHSWLTKTLQIYKINPVLRQFLTRTMETWRTNIHLKTQDGHIQTEELLIRRGIFQGDSLSSLWFCLCLNPLSNALNNTNYGFNIRHQKVNQHRINHLLYMDDIKLYAATEVQLKELLRITEVCTSDVRMEFGMSKCKVLHINKGQWKNQSEQEILTGETLDNMDKDETYKYLGFNQNIKIDHTQVKAQLTQEFRNRLLKLLKSKLNSKNLTKAINTFAIPVLTYSFGIIKWSHTDIENIHILIRTELTKHRMSHPNACKERLTIDRKQGGRGIIDIQSLRTRQIKTLRDFFQSKQTNLHRSIVKADKNYTPLNLSRSDHSADGHNHIELQQEKINTWSQKALHGKHRYRVTQDHINERQSYTWLQDGQLFPETEGFMLAIQDQVIATRNYMKYIIKDTSITDDNCRKCHQQKETIDHITSGCKTLAGTEYTARHNSAAKVIHQALATTNKLIENTDPYYNYTPTSVLENNEYKLYWDVEIHTDKTIPANRPDIVFQSKADKVTYLIDIAIPNDTNIQNTYAGKISKYSDLAIEIKRLWKQNKVTIVPLIMCVSGLTPNTFTPHLQQLGLDEKLHKIFQKSVILKTCNIVRSFLNSDP

SEQ ID NO: 32331 - protein, 1241 aa, Callosobruchus maculatus
MHRVTSKNNQRRPRVRRLNSPEPQTQIEQPIEHNPAADVLPAQPATTKAGKPRQRLQWTTEINKHVMRCYYIATKLETISTGYRHELHRLFLAQYPHLAERVTEQRLIDQKRVITKNNRLTPQELQAIKMVVSNEINTVHTNDSQSSNTTTTNTIHSEIDPEREHTPDIPDTTVLPNDSLATESTGQTIHTCDNQPPNTDITNNTNIHLEIDPEHDHTADTPETTSTNVPSTAAQSQNISLPPSITESAEQVMNVQYNKWCGTNPALRDPLPRLIFKNNTRQILNTINSNIIPHFLTNDSNLEDIHTVIYAAAATTIIVNGQKLPKRSKDHINKRPKPKWQIRIENKISTIRKDLAHLTQYTNNNNLSKRIQATINRLKSKSPQQTIPEISDTLKQKLAVYAARLRRYNESNERKDANNLFQKSEKQFYQKMTSNNQIIATEPPSRQELTEFWGSLWSEPKTHNENAPWIRQEEEKQQHIPEQGDVILTPQEIAETIRHTHNWKCPGVDNVQNFWYKQFSATYEMLTNQINKAILQPDRLPKFLTQGITYIKPKNADTKNPANYRPITCLPTLYKIITATIGKRIEQHLNQNNILTEEQKGCRKQSQGCKEQLIIDSVIMEQARKEHRNLHTCFIDYKKAFDSVPQSWLMKTLQVYKINTALRQFLSRTMETWRTNIHLKTQDGHIQTEELHIRRGIFQGDSLSSLWFCLCLNPLSNALNNTNYGFNIRHQKANQHRINHLLYMDDIKLYAATEVQLKELLRITEVCTSDVRMEFGMSKCKVLHIQKGQWKNHSEQETLAGQTLDNMDKDETYKYLGFNQSIKIDHSEVKAQLTQEFRDRLVRLLKTKLNSKNLTKAINKFAIPVLTYSFGIVKWSHTDIENINILIRTELTKHRMAHPKACKERLTIDRKQGGRGIIDIQSLHTRQIKTLRDFFQSKQTNLHRSIVKADKNYTPLTLSSPDHSADTHNHMESQQQKINTWSQKALHGKHRYRVTQEHINEKQSYTWLQDGQLFPETEGFMLAIQDQVIATRNYMKYIMKDTSITDDNCRKCHQQKETIDHITSSCKTLAGTEYTARHNSAAKVIHQALATTNKLIENTDPYYNYTPTSVLENNEYKLYWDVEIHTDKTIPANRPDIVFQSKADRVTYLIDIAIPNDTNVQNAYAGKISKYTDLAIEIKRLWKQNKVTIVPLIMSVSGLTPNTFTPHLKQLGLDERLHKIFQKSVILKTCNIVRSFLNSDP

SEQ ID NO: 32332 - protein, 1244 aa, Callosobruchus maculatus
MHRVTSKNNQRRPRVRRLNSPEPQPQTEQPIERNPAADVLPAQPATTKAGKPRQRLQWTTEINKSVMHCYYTATKLETISTGYRHELHRLFIAQYPHLAERVTEQRLIDQKRVITKSNRLTPEELQAIKILVSNEINTAHPNHLQTSNKTTIDNSSIHSDTDPEHEHTQHIPDTAVQPNDSSATESITEEHAIRIRNNQPPNTNPTNSTSVHSELDPEHDHTPVTPETICTNLPSTATQSQNITISPAITQSAEQVMNAQYSKWTGTNPTLRDPLPRLIFKNNTRQILHTMNVNIIPQFLTKDSDLENIHTVIYAAAATTLILNGQKLPKRSIARTTERSKPKWHIRIENKISTIRKDLAHLAQYTNNNRSKRVQTTIKILKSKSPQETIPEIADTLKQKLAVYAARLRRYNESNARKDANNLFHKSEKQFYQKITADNQITAIEPPSKQELTEFWGSLWSGPKTHNENAPWIRQEEEKHQHIAEQGDVILTPEEVAETIKHTHNWKCPGVDSVQNFWYKQFSATYQMLTDQINNAILQPNRLPKFLTQGITYIKPKNADTKNPANYRPITCLPTLYKIITATIGKRIEQHLNQNNILTEEQKGCRKQSQGCKEQLIIDSVIMEQARKEHRNLHTCFIDYKKAFDSVPHSWLMKTLQIYKINPALRQFLSRTMETWRTNIHLKTQDGHIQTEELHIRRGIYQGDSLSSLWFCLCLNPLSNALNNTNYGFNIRHQKVNQHRINHLLYMDDIKLYAATEVQLKELLRITEVCTSDVRMEFGMSKCKVLHIQKGQWKNHSEQETLTGQTLDNMEKDETYKYLGFNQSIKIDHSEVKAQLTQEFRDRLVRLLKTKLNSKNLTKAINTFAIPVLTYSFGIVKWSHTDIENINILIRTELTKHRMAHPKACKERLTIDRKQGGRGIIDIQSLHTRQIKTLRDFFQNKDTNLHRSIVKADKNYTPLTLSSPDHSADTHNHMESQQQKINTWSQKALHGKHRYRVTQEHINEKQSYTWLQDGQLFPETEGFMLAIQDQVIATRNYMKYIIKDTSITDDNCRKCHQQKETIDHITSACKTLAGNEYTARHNSAAKVIHQALATTNKPIENTDPYYNYTPTSVLENNEYKLYWDVEIHTDKTIPANRPDIVFQSEADKVTYLIDIAIPNDMNIQNAYAGKISKYTDLAIEVKRLWKQNKVVIVPLIMSVSGLTPNTFTPHLQQLGLDERLHKIFQKSVILKTCNIVRSFLNSDP

SEQ ID NO: 32333 - protein, 988 aa, Callosobruchus maculatus
MNAQFNKWCGTNPALRDPLPRLIFNSNTQKILHTINTNVIPQFLTSGSNLEDIHTVIYAAAAATLIVNGQKLPKRSNNHTSKRSKPKWQMRIENKITTIRKELAHLAQYTNNNNRSKRIQTTIDILKSKSPQKSIPEITDTLKQKLAVYAARLRRYNESNDRKDANNLFQKSEKQFYKKITTDNQITATELPSKQELTEFWGSLWSEPKTHNENAPWIRQEEEKHQHIAEQGNVILTPEEIAETIKHTHNWKCPGVDNIQNFWYKQFSSVYEVLTDQINKAILQPNRLPKFLTQGITYIKPKNADTKNPANYRPITCLPTLYKIITSTICRRIEKHLTENSILTEEQKGCRKQSQGCKEQLIIDSVIMEQTRKEHRNLHTCFIDYKKAFDSVPHSWLTKTLQIYKINPGLRQFLTRTMETWRTNIHLQTEDGHIQTDELHIRRGIFQGDSLSSLWFCLCLNPLSNTLNSTNCGFTIRHQKANQHKINHLLYMDDLKLYAATEVQLRELLRITEVCASDIKMEFGMSKCKVLHINKGQWKNHPEQEVVTGQALDNMDKDETYKYLGINQNAKIDHTKIKSQLTQEFKDRLIRLLKTKLNSRNLTKAINTFAIPILTYSFGIIKWSHTDIENIHILIRTELTKHRMSHPKACKERLTIDRKQGGRGIIDIQSLHAKQIKSLRHFFHSKQTNLHKAIVKADKNYTPLALSCPDHAANAYNHIQAQQEKINTWSQKALHGKHRYRVTQDHINEKQSYTWLQNGQLFPETEGFMLAIQDQVIATRNYKKYIMKDPSISDDNCRKCHQQKETIEHITSGCKTLAGTEYTARHNSAAKVIHQALATTNKLIENTDPYYNYTPTSVLENNQFKLYWDIEIHTDKTIPANRPDIVFQSKTDKVTYLIDIAIPNDMNIQNTYAGKISKYTDLAIEIKRLWKQNKVVIVPLIMSVSGLTPNTFTPHLQQLGLDEKLHKTFQKSVILKTCSIVRSFLNSE

SEQ ID NO: 32334 - protein, 1207 aa, Callosobruchus maculatus
MDRVNFINNQRRPRVRRLNSPEPQTEKEQPIGDNPVADVLPVEPATTKAGKPRQRLQWTTEMNTSVMHCYYTATKLETISTGYRHELHRLFTAQYPHLSARVTEQRLIDQKRVITKNNRLTPQQLQAIKNLVADEINTVETNDSLVNESITETQHDHTLNDKTPNPNTTNTTGTHLEENPEHEFIPDAPDTVCTNRPPTTTRNQNVTQTPSFTQSAEQVMNAQFNKWCGTNPALRDPLPRLIFNSNTQKILHTINTNVIPQFLTNGSNLEDIHTVIYAAAAATLIVNGQKLPKRSNNHTSKRSKPKWQMRIENKITTIRKELAHLAQYTNNNNRSKRIQTTIDILKSKSPQKSIPEITDTLKQKLAVYAARLRRYNESNDRKDANNLFQKSEKQFYKKITTDNQITAVELPSKQELTEFWGSLWSEPKTHNENAPWIRQEEEKHQHIVEQGNVILTPEEIAETIKHTHNWKCPGVDNIQNFWYKQFSSVYEVLTDQINKAILQPNRLPKFLTQGITYIKPKNADTKNPANYRPITCLPTLYKIITATICRRIEKHLTENSILTEEQKGCRKQSQGCKEQLIIDSVIMEQTRKEHRNLHTCFIDYKKAFDSVPHSWLTKTLQIYKINPGLRQFLTRTMETWRTNIHLQTEDGHIQTDELHIRRGIFQGDSLSSLWFCLCLNPLSNTLNSTNCGFTIRHQKANQHKINHLLYMDDLKLYAATEVQLRELLRITEACTSDIKMEFGMSKCKVLHINKGQWKNHPEQEVVTGQALDNMDKDETYKYLGINQNAKIDHTKIKSQLTQEFKDRLIRLLKTKLNSRNLTKAINTFAIPILTYSFGIIKWSRTDIENIHILIRTELTKHRMSHPKACKERLTIDRKQGGRGIIDIQSLHAKQIKSLRHFFHSKQTNLHKAIVKADKNYTPLALSCPDHAADAHNHTQAQQEKINTWSQKALHGKHRYRVSQDHINEKQSYTWLQDGQLFPETEGFMLAIQDQVIATRNYRKYVMKDPSISDDNCRKCHQQKETIEHITSGCKTLAGTEYTARHNSAAKVIHQALATTNKLIENTDPYYNYTPTSVLENNQFKLYWDIEIHTDKTIPANRPDIVFQSKTDKVTYLIDIAIPNDMNIQNTYAGKISKYTDLAIEIKRLWKQNKVVIVPLIMSVSGLTPNTFTPHLQQLGLDEKLHKTFQKSVILKTCSIVRSFLNSE

SEQ ID NO: 32335 - protein, 901 aa, Callosobruchus maculatus
MANANRKQNYHNQKGTGTPRTIHQQQQPFKTHTDNNRYPQIQVAPKSIPEITDTLKQKLAVYAARLRRYNESNDRKDANNLFQKSEKQFYKKITTDNQITAIELPSKQELTEFWGSLWSEPKTHNENAPWIRQEEEKHQHIAEQGNVILTPEEIAETIKHTHNWKCPGVDNIQNFWYKQFSSVYEVLTDQINKAILQPNRLPKFLTQGITYIKPKNADTKNPANYRPITCLPTLYKIITATICRRIEKHLTENSILTEEQKGCRKQSQGCKEQLIIDSVIMEQTRKEHRNLHTCFIDYKKAFDSVPHSWLTKTLQIYKINPGLRQFLTRTMETWRTNIHLQTEDGHIQTDELHIRRGIFQGDSLSSLWFCLCLNPLSNTLNSTNCGFTIRHQKANQHKINHLLYMDDLKLYAATEVQLRELLRITEVCTSDIKMEFGMSKCKVLHINKGQWKNHPEQEVVTGQALDNMDKDETYKYLGINQNAKIDHTKIKSQLTQEFKDRLIRLLKTKLNSRNLTKAINTFAIPILTYSFGIIKWSHTDIENIHILIRTELTKHRMSHPKACKERLTIDRKQGGRGIIDIQSLHAKQIKSLRHFFHSKQTNLHKAIVKADKNYTPLALSCPDHAADAHNHIQAQQEKINTWSQKALHGKHRYRVTQDHINEKQSYTWLQDGQLFPETEGFMLAIQDQVIATRNYRKYIMKDPSISDDNCRKCHQQKETIEHITSGCKTLAGTEYTARHNSAAKVIHQALATTNKLIENTDPYYNYTPTSVLENNQFKLYWDIEIHTDKTIPANRPDIVFQSKTDKVTYLIDIAIPNDMNIQNTYAGKISKYTDLAIEIKRLWKQNKVVIVPLIMSVSGLTPNTFTPHLQQLGLDEKLHKTFQKSVILKTCSIVRSFLNSE

SEQ ID NO: 32336 - protein, 1027 aa, Callosobruchus maculatus
MTNSRTTQFNKRCNTTTQNQNQNIARSPSITQTAEQVMNTQFNKWCGTNPALRDPLPRLIFKNNTQQILHTINTNLIPQFITNNSNLEDIHTVIYAAAATTLIVNGQKLQKRSKDQRSNRAKPKWQIRIENKISTLRKDLTHLAQYSNNNNHPSKHIQRTINILKSKSPQKSIPEIADTLKQKLAVYAARLRRYNESNDRKDANNLFQKSEKQFYQKITSNNQITTIEPPSRQELTAFWRSLWSEPKTHNENAPWIRQEETKHQHITEQGNVILTTEEIAETIKHTHNWKCPGVDNVQNFWYKQFSSTYEMLTDQINKAILQPNRLPKFLTQGITYIKPKNADTKNPANYRPITCLPTLYKIITATICRRIEQHLMQNNILTEEQKGCRKHSQGCKEQLIIDSVIMEQTRKEHRNLHTCFIDYKKAFDSVPHSWLMKTLQIYKINPGLRQFLKSTMETWRTNIHLQTHDGHIQTDELHIRRGIFQGDSLSSLWFCLCLNPLSNTLNSTNHGFNIRHHKADQHKINHLLYMDDIKLYAATEVQLRELLKITEVYTSDVRMEFGMSKCKVLHINKGQWKNQPEKEVVTGQPLDNMDKDETYKYLGFNQNVKIDHTQVKAQLTQEFKDRLIKLLKTKLNSKNLTKAINTFAIPVLTYSFGIIKWSHTDIENIHILIRTELTKHRMSHPNACKERLAIDRKLGGRGIIDIQSLRTTQIQTLRHFFHTKQTNLHKAIVKADKNYTPLNLSSPDHVADTYNHIQSQQEKINTWSQKALHGKHRYRVTQDHINQKQSYAWLQDGQLFPETEGFMLAIQDQVIATRNYKKYIIKDPSITDDNCRKCQQQKETIDHITSGCKTLAGTEYTARHNSAAKVIHQALATTNKLIENTDPYYNYTPTSVLEDDQYKLYWDVEIHTDKTIPANRPDIVFQSKADKITYLIDIAIPNDVNIQNTYAGKISKYTDLAMEIKRLWKQNKVTIVPLIMSVSGLTPSTFTQHLQQLGLDEKLHKVFQKSVILKTCNIVRSFLNSDQ

SEQ ID NO: 32337 - protein, 1155 aa, Callosobruchus maculatus
MLKMSKKSYFHILKKDSHCKIHEIIIISTGYRHELHRLFTAQYPHLSARVTEQRLIDQKRVIIKNNRLTPQQLQAIKNLVADEISTVETNDSLVNESIMETQHDHTLNDKTPNTNTTNTTGTHLEENPEHEFIPDAPDTVCTNRPPTTTQNQNVTQTPSFTKSAEQVMNAQFNKWCGTNPALRDPLPRLIFNSNTQKILHAINTNVIPQFLTEDSNLEDIHTVIYAAAAATLIVNGQKLPKRSNNHRSKRSKPKWQIRIENKITTIRKELAHLAQYTNNNNRSKRIQTTIDILKSKSPQKSIPEITDTLKQKLAVYAARLRRYNESNDRKDANNLFQKSEKQFYKKLATDNQITAIELPNKQELTEFWGSLWSEPKTHNENAPWIRQEEEKHQHIAEQGDVILTPEEIAETIKHTHNWKCPGVDNIQNFWYKQFSSVYEVLTDQINKAILQPNRLPKFLTQGVTYIKPKNADTKNPANYRPITCLPTLYKIITATICRRIEKHLTENSILTEEQKGCRKQSQGCKEQLIIDSVIMEQTRKEHRNLHTCFIDYKKAFDSVPHSWLTKTLQIYKINPGLRQFLTRTMETWRTNIHLQTEDGHIQTDELHIRRGIFQGDSLSSLWFCLCLNPLSNTLNSTNCGFTIRHQKANQHKINHLLYMDDLKLYAATEVQLRELLRITEVCTSDIKMEFGMSKCKVLHINKGQWKNHPEQEVVTGQALDNMDKNETYKYLGINQNAKIDHTKIKSQLTQEFKDRLIRLLKTKLNSRNLTKAINTFAIPILTYSFGIIKWSHTDIENIHILIRTELTKHRMSHPKACKERLTIDRKQGGRGIIDIQSLHAKQIKSLRHFFHSKQTNLHKAIVKADKNYTPLALSCPDHAADAHNHIKAQQEKINTWSQKALHGKHRYRVTQDHINEKQSYTWLQDGQLFSETEGFMLAIQDQVIATRNYRKYIMKDPSISDDNCRKCHQQKETIEHITSGCKTLAGTEYTARHNSAAKVIHQALATTNKLIENTDPYYNYTPTSVLENNQFKLYWDIEIHTDKTIPANRPDIVFQSKTDKVTYLIDIAIPNDMNIQNTYAGKISKYTDLAIEIKRLSKQNKVVIVPLIMSVSGLTPNTFTPHLQQLGLDEKLHKTFQKSVILKTCSIVRSFLNAE

SEQ ID NO: 32338 - protein, 990 aa, Callosobruchus maculatus
MNTQYNKWCGTNPVLRDPLPRLIFKNNTRQILHTINANIIPQFLTNDSDLEDIHTVIYAAAATTLIVNGQKLPKRSSQNHTSKRSKPKWQIRIENKISTLRKDLAHVTQYTNNNNLSKRIQTTINRLKSKSPQQTIPEIADTLKQKLAVYAARLRRYNESNDRKDANNLFQKSEKQFYQKMTSNNQITTTEPPSRQELTEFWGSLWSEPKTHNENAPWIRREEEKHQHIAEQEDVVFTPDEIAETIKHTHNWKCPGVDNVQNFWYKQFSATYEMLTEQINKAILQPNRLPKFLTQGITYIKPKNGDTRNPANYRPITCLPTLYKIITATIGKRIEQHLTQNNILTEEQKGCRKQSQGCKEQLIIDSVIMEQTRKEHRNLHTCFIDYKKAFDSVPHSWLTKTLQIYKINPVLRQFLTRTMETWRTNIHLKTQDGHIQTEELLIRRGIFQGDSLSSLWFCLCLNPLSNALNNTNYGFNIRHQKVNQHRINHLLYMDDIKLYAATEVQLKELLRITEVCTSDVRMEFGMSKCKVLHINKGQWKNQSEQEILTGETLDNMVKDETYKYMGFNQNIKIDHTQAKAQLTQEFRNRLLKLLKSKLNSKNLTKAINTFAIPVLTYSFGIIKWSHTDIENIHILIRTELTKHRMSHPNACKERLTIDRKQGGRGIIDIQSLHTRQIKTLRDFFQSKQTNLHRSIVKADKNYTPLNLSRSDHSVDGHNHIELQQEKINTWSQKALHGKHRYRVTQEHINERQSYTWLQDGQLFPETEGFMLAIQDQVIATRNYMKYIIKDTSITDDNCRKCHQQKETIDHITSGCKTLAGTEYTARHNSAAKVIHQALATTNKLIENTEPYYNYTPTSVLENNEYKLYWDVEIHTDKTIPANRPDIVFQSKADKVTYLIDIAIPNDTNIQNAYAGKISKYTDLAIEIKRLWKQNKVTIVPLIMSVSGLTPNTFTPHLQQLGLDEKLHKIFQKSVILKTCNIVRSFLNSDP

SEQ ID NO: 32339 - protein, 1214 aa, Callosobruchus maculatus
MDRVNFMNNQRRPRVRRLNSPEPQTQTEQLIEHNPAADVLPTQPATTKAGKPRQRLQWTTEMNKSVMRCYYTATKLETISTGYRHELHRLFTTQYPHLSTRVTEQRLIDQKRVITKNNRLTPQELQDIKNLVSNEMNIVQPNDSLTTEQIVETQNSDTQNSDTQTSQTSNIAKTNNTSIHSELGPEHDQALDTPDTTTTNLPSTIIQIQNITRPFAVTQSVEQVMRTQYNKWCGTNPALRDPLPRLIFKNNTQQILHTVNANVIPQFIRNDSNLEDIHTVIYAAAATTLIVNGQKLSKRSKHQTSNRTKPKWQIRIENKISTIRKDLAHLAQYTINNNHPSRHIQRTINILKSKSPQQTIPEITDTLKQKLAVYAARLRRYNESNARKDANSLFQKSEKQFYQKITADNQITTIEPPSKQELTEFWGSLWSEPKTHNEDAPWIREEEEKHQHIAEQGDVVLSKEEIVETIKHTHDWKCPGVDNVQNFWYKHFSSTYQVLTNQINKAIRQPDRLPKFLTQGITYIKPKNADTKNPANYRPITCLPTLYKIITATLCRRIEQHLTQNNILTEEQKGCRKQSQGCKEQLIIDSVIMEQTRKDHRNLHTCFIDYKKAFDSVPHSWLTKILQIYKINPGLRQFLAKTMKTWRTNIHLTTQDGHIQTEELHIRRGIFQGDSLSSLWFCLCLNPLSNALNNTNYGFNIRHQKVNQHRINHLLYMDDIKLYAATDVQLRELLRITEVYTSDVRMEFGMNKCKVLHINKGQWKNHPEQEIVTGQTLDNMDKEETYKYLGFNQSVKIDHTQIKAELRQVFRDRLIKLLKTKLNSRNLTKAINTFAIPILTYSFGIIKWSHTDIENIQILIRTELTKHRMSHPNACKERLTIDRTQGGRGITDIQSLRTRQIKTLRHFFQNKQTNLHRAIVKADKNYTPLNLSCPDHVADTNNPTQSQQEKISTWSQKPLHGKHRYRVTQDHINKKQSYTWLQDGQLFPETEGFMLAIQDQVIATRNYKKYIIKDPSITDDNCRKCQQQKETIDHITSGCKTLAGTEYTARHNSAAKVIHQALATTNKLIENTDPYYNYTPTSVLENDQYKLYWDVQIHTDKTIPANRPDIVFQSKLDKVTYLIDIAISNDVNIQNTYAGKISKYTDLAMEIKRLWKQDKVTIVPLIMSVSGLTPNTFTPHLQQLGLDEKLHKTFQKSVILKTCNIVRSFLNSDQ

SEQ ID NO: 32340 - protein, 1209 aa, Callosobruchus maculatus
MDRVNFINNQRRPRVRRLNSPEPQTQTEQPIEHNPAADVLPTQPATTKAGKPRQRLQWTTEMNKSVMRCYYTATKLETISTCYRHELHRLFTTQYPHLSTRVTEQRLIDQKRVITKNNRLTPQELQDIKHLVSIEMNIVEPNDSLTTEQIVETQNSDTQTSQTSNTAKTNNTSILSELGPEHDQALDTPDTTITNLPSTIIQIRNITRPFAVTQSVEQVMSTQYNKWCGTNPALRDPLPRLIFKNNTQQILHTVNANVIPQFIRDDSNLEDIHTVIYAAAATTLIVNGQKLSKRSKHQTSNRTKPKWQIRIENKISTIRKDLAHLAQYTINNNHPSRHIQRTINILKSKSPQQTIPEITDTLKQKLAVYAARLRRYNESNARKDANSLFQKSEKQFYQKITADNQITTIEPPSKQELTEFWGSLWSEPKTHNEDAPWIREEEEKYQHIAEQGDVILSKEEIVETIKHTHDWKCPGVDNVQNFWYKHFSSTYEVLTNQINKAIRQPDRLPKFLTQGITYIKPKNADTKNPANYRPITCLPTLYKIITATLCRRIEQHLTQNNILTEEQKGCRKQSQGCKEQLIIDSVIMEQTRKEHRNLHTCFIDYKKAFDSVPHSWLTKILQIYKISPGLRQFLAKTMKTWRTNIHLTTQDGHIQTEELHIRRGIFQGDSLSSLWFCLCLNPLSNALNNTNYGFNIRHQKVNQHRINHLLYMDDIKLYAATDVQLRELLRITEVYTSDVRMEFGMNKCKVLHINKGQWKNHPEQEIVTGQTLDNMDKEETYKYLGINQSVKIDHTQIKAELRQVFRDRLIKLLKTKLNSRNLTKAINTFAIPILTYSFGIIKWSHTDIENIHILIRTELTKHRMSHPNACKERLTIDRTQGGRGITDIQSLRTRQIKTLRHFFQNKQTNLHRAIVKADKNYTPLNLSCPDHVADTHNPTQSQQEKISTWSQKPLHGKHRYRVTQDHINKKQSYTWLQDGQLFPETEGFMLAIQDQVIATRNYKKYIIKDPSITDDNCRKCQQQKETIDHITSGCKTLAGTEYTARHNSAAKVIHQALATTNKLIENTDPYYNYTPTSVLENDQYKLYWDVQIHTDKTIPANRPDIVFQSKLDKVTYLIDIAIPNDVNIQNTYAGKISKYTDLAMEIKRLWKQDKVTIVPLIMSVSGLTPNTFTPHLQQLGLDEKLHKTFQKSVILKTCNIVRSFLNSDQ

SEQ ID NO: 32341 - protein, 622 aa, Callosobruchus maculatus
MEQTGKEHRNLHTCFIDYKKAFDSVPHSWLTKILQIYKINPGLRQFLAKTMKTWRTNIHLTTQDGHIQTEELHIRRGIFQGDSLSSLWFCLCLNPLSNALNNTNYGFYIRHQKVNQHRINHLLYMDDIKLYAATDVQLRELLRITEVYTSDVRMEFGMNKCKVLHINKGQWKNHPEQEIVTGQTLDNMDKEETYKYLGFNQSVKIDHTQIKAELRQVFRDRLIKLLKTKLNSRNLTKAINTFAIPILTYSFGIIKWSHTDIENIHILIWTELTKHRMSHPNACKERLTIDRTQGGRGITDIQSLRTRQIKTLRHFFQNKQTNLHRAIVKADKNYTPLNLSCLDHVADTHNPTQSQQEKISTWSQKPLHGKHRYRVTQDHINRKQSYTWLQNGQLFPETEGFMLAIQDQVIATRNYKKYIIKDPSITDDNCRKCQQQKETIDHITSGCKTLAGTEYTARHNSAAKVIHQALATTNKLIENTDPYYNYTPTSVLENDQYKLYWDVQIHTDKTIPANRPDIVFQSKLDKVTYLIDIAIPNDVNIQNTYAGKISKYTDLAMEIKRLWKQDKVTIVPLIMSVSGLTPNTFTPHLQQLGLDEKLHKTFQKSVILKTCNIVRSFLNSDQ

SEQ ID NO: 32342 - protein, 1207 aa, Callosobruchus maculatus
MHKVTSTNNQRRPRVRRLNSPEPQTEKEQPIGDNPVADVLPVEPATTKAGKPRQRLQWTTEMNTSVMHCYYTATKLETISTGYRHELHRLFTAQYPHLSARVTEQRLIDQKRVIIKNNRLTPQQLQAIKNLVADEISTVETNDSLVNESIMETQHDHTLNDKTPNTNTTNTTGTHLEENPEHEFIPDAPDTVCSNRPPTTTRNQNVTQTPSFTQSAEQVMNAQFNKWCGTNPALRDPLPRLIFNSNTQKILHTINTKVIPQFLTEDSNLEDIHTVIYAAAAATLIVNGQKLPKRSNNHRSKRSKPKWQMRIENKITTIRKELAHLAQYTNNNNRSKRIQTTIDILKSKSPQKSIPEMTDTLKQKLAVYAARLRRYNESNDRKDANNLFQKSEKQFYKKITTDNQITAIELPNKQELTEFWGSLWSEPKTHNENAPWIRQEEEKHQHIAEQGDVILTPEEIAETIKHTHNWKCPGVDNIQNFWYKQFSSVYEVLTDQINKAILQPNRLPKFLTQGITYIKPKNADTKNPANYRPITCLPTLYKIITATICRRIEKHLTENSILTEEQKGCRKQSQGCKEQLIIDSVIMEQTRKEHRNLHTCFIDYKKAFDSVPHSWLTKTLQIYKINPGLRQFLTRTMETWRTNIHLQTEDGHIQTDELHIRRGIFQGDSLSSLWFCLCLNPLSNTLNSTNCGFTIRHQKANQHKINHLLYMDDLKLYAATEVQLRELLRITEVCTSDIKMEFGMSKCKVLHINKGQWKNHPEQEVVTGQALDNMDKNETYKYLGINQNAKIDHTKIKSQLTQEFKDRLIRLLKTKLNSRNLTKAINTFAIPILTYSFGIIKWSHTDIENIHILIRTELTKHRMSHSKACKERLTIDRKQGGRGIIDIQSLHAKQIKSLRHFFHSKQTNLHKAIVKADKNYTPLALSCPDHAADAHNHIKAQQEKINTWSQKALHGKHRYRVTQDHINEKQSYTWLQDGQLFPETEGFMLAIQDQVIATRNYRKYIMKDPSISDDNCRKCHQQKETIEHITSGCKTLAGTEYTARHNSAAKVIHQALATTNKLIENTDPYYNYTPTSVLENNQFKLYWDIEIHTDKTIPANRPDIVFQSKTDKVTYLIDIAIPNDMNIQNTYAGKISKYTDLAIEIKRLWKQNKVVIVPLIMSVSGLTPNTFTPHLQQLGLDEKLHKTFQKSVILKTCNIVRSFLNSE

SEQ ID NO: 32343 - protein, 717 aa, Callosobruchus maculatus
MLTDQINKAILQPNRLPKFLTQGVTYIKPKNADTKNPANYRPITCLPTLYKIITATIGKRIEQHLTQNNILTEEQKGCRKQSQGCKEQLIIDSVIMEQTRKEHRNLHTCFIDYKKAFDSVPHSWLTKTLQIYKINPTLRQFLTRIMETWRTNIHLKTQDGHIQTEELYIRRGIFQGDSLSSLWFCLCLNPLSNALNNTNYGFNIRHQKVNQHRISHLLYMDDIKLYAATEVQLKELLKITEVCTSDVRMEFGMSKCKVLHIHKGQWKNHSEQEILTGETLDNMEEDETYKYLGFNQNIKIDHSEVKAQLTQELRDRLITLLKTKLNSKNLTKAINTFAIPVLTYSFGIIKWSHTDIENINILIRTELTKHRMSHPKACKERLTTDRKHGGRGIIDIQSLHTRQIKTLRDFFQSKETNLHRSIVKADRNYTPLTLSRPDHPADAHNHIELQQEKINTWSQKALHGKHRYRVTQDHINERQSYTWLQDGQLFPETEGFMLAIQDQVIATRNYMKYIIKDTSVTDDNCRKCHQQKETIDHITSACKTLAGTEYTARHNSAAKVIHQALATTNKLIENTDPYYNYTPTSVLENNEYKLYWDVEIHTDKTIPANRPDIVFQSKADKVTYLIDIAIPNDTNIQNAYAGKISKYTDLAIEIKRLWKQNKVTIVPLIMSVSGLTPNTFTPHLQQLGLDERLHKIFQKSVILKTCNIVRSFLNSDP

SEQ ID NO: 32344 - protein, 1208 aa, Callosobruchus maculatus
MDKVSFSNNQRRPRVRRLNSPEPQNQTPQPIAHNPTADVLPVQPATTKAGKPRQRLQWTTEMNKSVMHCYYTATKLETISTGYRHELHRLFTAQYPHLSTRVTEQRLIDQKRVITKNNRLTPQELQAIKSLVSNEINTVPPNDSLADESTTERQNIHSRNSQTPNTDTTNDTSIHSDMDSEHEHIRDTPDQTSINLPLTATQSQKVTPPPSITQSTEQVMDTQYNKWCGTNPALRDPLPRLIFKKNTQQILHTINSNIIPQFLINVSNLEDIHTVIYAAAATTLTVNGQKLPKRSKGHTSNSPKPKWQIRIENKISAIRKDLAHLAQYTNNNNRSKRIQTTIDILKSKSPQKSIPEIADTLKQKLAVYAARLRRYNESNERKNVNNLFQKSEKQFYQKITANNQEATIEPPSRQDLTEFWSSLWSEPKTHNQDAPWIRQEEEKHQHIMEQGDVILTPEEIAETIKHTHNWKCPGVDNIQNFWYKQFSSTYEVLTDQINKAILQPNRLPKFLTQGITYIKPKNTDTKNPANYRPITCLPTLYKIITATICRRIEQHLTQNNILTEEQKGCRKQSQGCKEQLIIDSVIMEQTRKEHRNLHTCFIDYKKAFDSVPHSWLKKTLQIYKVNSGLRQFLTRIMETWRTNIHLKTQHGHIQTDELHIRRGIFQGDSLSSLWFCLCLNPLSNALNNTNCGFNIRHEKVNQHKINHLLYMDDIKLYAATEVQLRELLRITEVCTSDVRMEFGMSKCKVLHINKGQWKSNQERETLTGQTLDNMDRGETYKYLGFNQSVKIDHSQVKEQLIQEFRDRLIKLLKTKLNSRNLTKAINTFAIPVITYSFGIIKWSHTDIENIQILIRTELTRHRMSHPNACKERLTIDRKQGGRGIIDIQSLRTKQIKTLRHFFQSKQTNLHRAVVKADKNYTPLTLSSPNHAADSHNPIELQQEKINTWSQKALHGKHRYRITQDHINEKQSYAWLQDGQLFPETEGFMLAIQDQVIATRNYKKYIIKDPSVTNDNCRKCHQQKETIDHITSACKTLAGTEYTARHNSAAKIIHQALATTNKLIENTAPYYNYTPTSVLDNNQYKLYWDVEIHTDKTIPANRPDIVFQSKADKVTYLIDIAIPNDTNVQTAYAGKISKYTDLAIEVKRLWKQNKVVIVPLIMSVSGLTPNTFTPHLHQLGLDEKLHKIFQKSVILKTCNIVRSFLNSDQ

SEQ ID NO: 32345 - protein, 988 aa, Callosobruchus maculatus
MNTQYNKWCGTNPTLRDPLPRLIFKNNTRQILQTVNSNIIPQFLTKDSNLEDIHTVIYAAAATTLIVNGQKLPKRSKDHTSKRSKPKWQIRIENKISTIRKDLAHVSQNIHKNNLSKRIQTTISRLKSRSPQQTISEIYDTLKQKLAVYAARLRRYNESNDRKDTNNLFQKSERQFYQKITSNNQITIEPPSRKELTDFWGSLWSEPKTHNENAPWIRQEEEKQQHIPEQGDVILTPQEIAETIKHTQNWKCPGVDNVQNFWYKQFSATYEMLTDQINKAILQPNRLPKFLTQGVTYIKPKNADTKNPANYRPITCLPTLYKIITATIGKRIEQHLTQNNILTEEQKGCRKQSQGCKEQLIIDSVIMEQTRKEHRNLHTCFIDYKKAFDSVPHSWLTKTLQIYKINTTLRQFLTRIMETWRTNIHLKTQDGHIQTEELYIRRGIFQGDSLSSLWFCLCLNPLSNALNNTNYGFNIRHQKVNQHRISHLLYMDDIKLYAATEVQLKELLKITEVCTSDVRMEFGMSKCKVLHIRKGQWKNHSEQEILTGETLDNMEKDETYKYLGFNQNIKIDHSEVKAQLTQEFRDRLITLLKTKLNSKNLTKAINTFAIPVLTYSFGIIKWSHTDIENINILIRTELTKHRMSHPKACKERLTIDRKHGGRGIIDIQSLHTRQIKTLRDFFQSKETNLHRSIVKADKNYTPLILSRPDHTADAHNHIELQQEKINTWSQKALHGKHRYRVTQDHINERQSYTWLQDGQLFPETEGFMLAIQDQVIATRNYMKYIIKDTSITDDNCRKCHQQKETIDHITSACKTLAGTEYTARHNSAAKVIHQALATTNKLIENTDPYYNYTPTSVLENNEYKLYWDVEIHTDKTIPANRPDIVFQSKADKVTYLIDIAIPNDTNIQNAYAGKISKYTDLAIEIKRLWKQNKVTIVPLIMSVSGLTPNTFTPHLQQLGLDERLHKIFQKSVILKTCNIVRSFLNFDP

SEQ ID NO: 32346 - protein, 1027 aa, Callosobruchus maculatus
MTNSRTTQFNKRCNTTTQNQNQNIARSPSITQTAEQVMNTQFNKWCGTNPALRDPLPRLILKNNTQQILHTINTNLIPQFITNNSNLEDIHTVIYAAAATTLIVNGQKLQKRSKDQRSNKAKPKWQIRIENKISTLKKDLAHLAQYSNNNNHPSKHIQRTINILKSKSPQKSIPEIADTLKQKLAVYAARLRRYNESNDRKDVNNLFQKSEKQFYQKIASNNQITTIEPPSRQELTAFWRSLWSEPKTHNENAPWIRQEETKHQHITEQGKVILTTEEIAETIKHTHNWKCPGVDNVQNFWYKQFSSTYEMLTDQINKAILQPNRLPKFLTQGITYIKPKNADTKNPANYRPITCLPTLYKIITATICRRIEQHLMQNNIRTEEQKGCRKHSQGCKEQLIIDSVIMEQTRKEHRNLHTCFIDYKKAFDSVPHSWLMKTLQIYKINPGLRQFLKSTMETWRTNIHLQTHDGHIQTDELHIRRGIFQGDSLSSLWFCLCLNPLSNTLNSTNHGFNIRHHKADQHKINHLLYMDDIKLYAATEVQLRELLKITEVYTSDIRMEFGVSKCKVLHINKGQWKNQPEKEVVTGQPLDNMDKDETYKYLGFNQNVKIDHTQVKAQLTQEFKDRLIKLLKTKLNSKNLTKAINTLAIPVLTYSFGIIKWSHTDIENIHILIRTELTKHRMSHPNACKERLAIDRKLGGRGIIDIQSLRTTQIQTLRHFFHTKQTNLHKAIVKADKNYTPLNLSSPDHVADTYNHIQSQQEKINTWSQKALHGRHRYRVTQDHINQKQSYAWSQDGQLFPETEGFMLAIQDQVIATRNYKKYIIKDPSITDDNCRKCQQQKETIDHITSGCKTLAGTEYTARHNSAAKVIHQALATTNELIENTDPYYNYTPTSVLENDQYKLYWDVEIHTDKTIPANRPDIVFQSKADKITYLIDIAIPNDVNIQNTYAGKISKYTDLAMEIKRLWKQNKVTIVPLIMSVSGLTPSTFTQHLQQLGLDEKLHKVFRKSVILKTCNIVRSFLNSDQ

SEQ ID NO: 32347 - protein, 935 aa, Callosobruchus maculatus
MYIIIITIITLILNGQKLPKRSTDHTTERSKPKWQIRIENKISAIKKDLAHLAQYTNNNNPSKRVQRTVNILKSKSPQQTVPEIADTLKQKLAVYAARLRRYNESNARKDANNLFQKSEKQFYQKITSDNQITTIEPPSKQELTEFWGSLWSEPKTHNEDAPWIKQEEQKHQHIEEQGDIILTPEEIAETIKHTHNWKCPGVDNIQNFWYKQFSATYEMLANQINKAIIQPERFPKFLTQGITYIKPKNADTKNPANYRPITCLPTLYKIVTATICRRIEQHLTQNSILTEEQKGCRKQSQGCKEQLIIDSVIMEQTRKEHRSLHTCFIDYKKAFDSVPHSWLTKILQIYKINPGIRRFLTRTMETWRTNIHLKTQDGHIQTEELNIRRGIFQGDSLSSLWFCLCLNPLSNALNSTNYGFNIRHQKANQHRINHLLYMDDIKLYAATDVQLRELLRITEVCTSDVRMEFGMSKCKVLHINKGQWKNHPQQEIVTGQTLDNMDKEETYKYLGVNQSVKIDHTQTKAQLRQVFRDRLIKLLKTKLNSRNLTKAINTFAIPILTYSFGIIKWSHTDIENIHILIRTELTKHRMSHPNACKERLTIDRKQGGRGIIDIQSLHSRQIKTLRHFFQGKQTNLHRSIVKADKNYTPLNLSCPDHAADTYNHIQSQQEKINTWSQKALHGKHRYRVTQDHINERQSYTWLHDGQLFPETEGFMLAIQDQVIATQNYKKYIIKDPSITDDNCRKCHQQKETIDHITSGCKTLAGNEYTARHNSAAKVIHQALATTNKLIENTDPYYNYTPTSVLENNQYKLYWDVEIHTDKTIPANRPDIVFQSKLDKVTYLIDIAIPNDVNIQNTYAGKISKYTDLAMEIKRLWKQDKVTIVPFIMSVSGLTPNTFTPHLQQLGLDERLHKTFQKSVILKTCNIVRSFLNSDQ

SEQ ID NO: 32348 - protein, 889 aa, Callosobruchus maculatus
MYGIFGSLQNIRTDISTCCLRYNNNNNNNNNYILLYIICDTLKQKLAVYAARLRRYNESNDRKDTNNLFQKSERQFYQKITSNNQITTIEPPSRKELTDFWGSLWSEPKTHNENAPWIRQEEEKQQQIPEQGDVILTPQEIAETIKHTHNWKCPGVDNVQNFWYKQFSATYEILTDQINKAILQPNRLPKFLTQGVTYIKPKNADTKNPANYRPITCLPTLYKIITATIGKRIEQHLTQNNILTEEQKGCRKQSQGCKEQLIIDSVIMEQTRKEHRNLHTCFIDYKKAFDSVPHSWLTKTLQIYKINPTLRQFLTRTMETWRTNIHLKTQDGHIQTEELCIRRGIFQGDSLSSLWFCLCLNPLSNALNNTNYGFNIRHQKVNQHRISHLLYMDDIKLYAATEVQLKELLKITEVCTSDVRMEFGMSKCKVLHIHKGQWKNHSEQEILTGQTLNNMEKDETYKYLGFNQNIKIDHSEVKAQLTQEFRDRLITLLKTKLNSKNLTKAINTFAIPVLTYSFGIIKWSHTDIENINILIRTELTKHRMSHPKACKERLTIDRKHGGRGIIDIQSLHTRQIKTLRDFFQSKETNLHRSIVKADKHYTPLTLSRPDHPADAHNHIELQQEKINTWSQKALHGKHRYRVTQDHINERQSYTWLQDGQLFPETEGFMLAIQDQVIATRNYMKYIIKDTSITDDNCRKCHQQKETIDHITSACKTLAGTEYTARHNSAAKVIHQALATTNKLIENTDPYYNYTPTSVLENNEYKLYWDVEIHTDKTIPANRPDIVFQSKADKVTYLIDIAIPNDTNIQNAYAGKISKYTDLAIEIKRLWKQNKVTIVPLIMSVSGLTPNTFTPHLKQLGLDERLHKIFQKSVILKTCNIVRSFLNSDP

SEQ ID NO: 32349 - protein, 1205 aa, Callosobruchus maculatus
MDKVSFSNNQRRPRVRRLNSPEPQNQTQQPTAHNPTADVLPVQPATTKAGKPRQRLQWTTEMNKSVMHCYYTATKLETISTGYRHELYRLFTAHLSTRVTEQRLIDQKRVITKNNRLTPQELQAIKSLVSNEINTVTPNDSLADESITERQNNHTLSNQTPNTDTTNNTSIHLDVDSEHEHTPDTPNQTSINLPSTATQSQNVTPPPCITQSTEQVMNTQYNKWCGTNPTLRDPLPRLIFKNNTRQILQTVNSNIIPQFLTKDSNLEDIHTVIYAAAATTPIVNGQKLPKRSKDHTSKRSKPKWQIRIENKISTIRKDLAHVSQYIHKNNLSKRIQTTINRLKSRSPQQTISEIYDTLKQKLAVYAARLRRYNESNDRKDTNNLFQKSERQFYQKITSNNQITTIEPPSRKELTDFWGSLWSEPKTHNENAPWIRQEEEKQQHIPEQGDVILTPQEIAETIKHTHNWKCPGVDNVQNFWYKQFSTTYEILTDQINKAILQPNRLPKFLTQGVTYIKPKNADTKNPANYRPITCLPTLYKIITATIGKRIEQHLTQNNILTEEQKGCRKQSQGCKEQLIIHSVIMEQTRKEHRNLHTCFIDYKKAFDSVPHSWLTKTLQIYKINPTLRQFLTRTMETWRTNIHLKTQDGHIQTEELCIRRGIFQGDSLSSLWFCLCLNPLSNALNNTNYGFNIRHQKVNQHRISHLLYMDDIKLYAATEVQLKELLKITEVCTSDVRMEFGMSKCKVLHIHKGQWKNHSEQEILTGQTLDNMEKDETYKYLGFNQNIKIDHSEVKAQLTQEFRDRLITLLKTKLNSKNLTKAINTFAIPVLTYSFGIIKWSHTDIENINILIRTELTKHRMSHPKACKERLTIDRKHGGRGIIDIQSLHTRQIKTLRDFFQSKETNLHRSIVKADKHYTPLTLSRPDHPADAHNHIELQQEKINTWSQKALHGKHRYRVIQDHINERQSYTWLQDGQLFLETEGFMLAIQDQVIATRNYMKYIIKDTSITDDNCRKCHQQKETIDHITSACKTLAGTEYTARHNSAAKVIHQALATTNKLIENTDPYYNYTPTSVLENNEYKLYWDVEIHTDKTIPANRPDIVFQSKADKVSYLIDIAIPNDTNIQNAYVGKISKYTDLAIEIKRLWKQNKVTIVPLIMSVSGLTPNTFTPHLKQLGLDERLHKIFQKSVILKTCNIVRSFLNSDP

SEQ ID NO: 32350 - protein, 864 aa, Callosobruchus maculatus
MKSKSPQKSIPEIADTLKQKLAVYAARLRRYKESNDRKDANNLFQKSEKQFYQKITSNNQITTIEPPSRQELTAFWGSLWSEPKTHNEHAPWIRQEETKHQHITEQGNVILTTEEIAETIKHTHNWKCPGVDNVQNFWYKQFSSTYEMLTDQINKAILQPNRLPNFLTQGITYIKPKNADTKNPANYRPITCLPTLYKIITATICRRIEQHLMQNNILTEEQKRCRKHSQGCKEQLIIDSVIMEQTRKEHRNLHTCFIDYKKAFDSVPHSWLMKTLQIYKINPGLRQFLKSTMETWRTNIHLQTHDGHIQTDELHIRRGIFQGDSLSSLWFCLCLNPLSNTLNSTNHGFNIRHHKADQHKINHLLYMDDIKLYAATEVQLRELLKVTEVYTSDIRMEFGMSKCKVLHINKGQWKNQPEKEVVTGQPLDNMDKDETYKYLGFNQNVKIDHTQVKAQLTQEFKDRLIKLLKTKLNSKNLTKAINTSAIPVLTYSFGIIKWSHTDIENIHILIRTELTKHRMSHPNACKERLAIDRKLGGRGIIDIQSLRTTQIQTLRHFFHTKQTNLHKAIVKADKNYTPLNLSSPDHVADTYNHIQSQQEKINTWSQKALHGKHRYRVTQNHINQKQSYAWLQDGQLFPETEGFMLAIQDQVIATRNYKKYIIKDPSITDDNCRKCQQQKETIDHITSGCKTLAGTEYTARHNSAAKVIHQALATTNKLIENTDPYYNYTPTSVLENDQYKLYWDVEIHTDKTIPANRPDIVFQSKADKITYLIDIAIPNDVNIQNTYAGKISKYTDLAMEIKRLWKQNKVTIVPLIMSVSGLTPSTFTQHLQQLGLDEKLHKVFQKSVILKTCNIVRSFLNSDQ

SEQ ID NO: 32351 - protein, 989 aa, Callosobruchus maculatus
MNTQYNKWCGTNPTLRDPLPRLIFKNNTLQILHTINVNIIPQFLTKDSDLEDIHTVIYAAAATALTLNGQKLPKRSIARTTERSKPKWQIRIENKISTIRKDLAHLVQYTNNNNRSKRVQTTINMLKSKSPQQTIPEIADTLKQKLAVYAARLRRYNESNARKDANNLFQKSEKQFYQKITADNQITAIEPPSKQELTEFWGSLWSKPKTHNENAPWIRQEEEKHQHIVEQEDVILTPEEIAETIKHTHNWKCPGVDNVQNFWYKQFSATYEMLTDQINKAILQPNRLPKFLTQGITYIKPKNADTKNPANYRPITCLPTLYKIITATICRRIEQHLTQNNILTEEQKGCRKQSQGCKEQLIIDSVIMEQTRKEHRNLHTCFIDYKKAFDSVPHSWLAKTLQIYKINPGLREFLASTMETWRTSIHLKTQDGLIKTDELHIRRGIFQGDSLSSLWFCLCLNPLSNALNNTNCGFNIRHDRLNQHKINHLLYMDDIKLYAANEVQLKELIRTTEACSSDVRMEFGMSKCKVLHINKGQWKDHPQQETVAGQTLNNMNKDETYKYLGFNQNVKIDHTQVKAQLTQEFRDRLIKLLKTKLNSRNLTKAINTFAIPVLTYSFGIIKWSHTDIENIHILIRTELTKHRMSHPNACKERLTIDRKQGGRGITDIQSLRTRQIKTLRHFFQNKQTNLHRAIVIADKNYTPLNLSCPDHVADTHNPTQSQQEKISTWSQKPLHGKHRYRITQDHINEKQSYTWLQDGQLFPETEGFMLAIQDQVIATRNYKKYVIKDPSITNDNCRKCQQQKETIDHITSACKTLAGTEYTARHNSAAKIIHQALATKNKLIENSDPYYKYTPTSVLENDHYKLYWDVEIHTDKTINANRPDIVFQIKADKVTYLIDIAIPNDVNVQNTYAGKISKYTDLAIEVKRIWKQDKVIIVPFIMSVSGLTPNTFTQHLQQLGLDESLHKIFQKSVILKTCNIVRSFLNSDQ

SEQ ID NO: 32352 - protein, 1206 aa, Callosobruchus maculatus
MLPAQPATTKAGKPRQRLQWTTEINKSVMHCYYTATKLETISTGYRHELHRLFIAQYPHLAERVTEQRLIDQKRVITKNNRLTPEELQAIKILVSNEINTADPNHLQTSNKTTIDNTSIHSDTDPEHEHTQHIPDTAVQPNDSSATESITEGHAIRIRNNQPPNTNPANSTSVHSELDPEHDHTPVTPETICTNLPSTATQSQNITIPPAITQSAEQVMNTQYNKWSGTNPTLRDPLPRLIFKNNTRQILHTMNVNIIPQFLTKDSDLENIHTVIYAAAATTLILNGQKLPKRSIARTTERSKPKWQIRIENKISTIRKDLAHLAQYTNNNRSKRVQTTINILKSKSPQKTIPEIADTLKQKLAVYAARLRRYNESNARKDANNLFHKSEKQFYQKITADNQITAIEPPSKQELTEFWGSLWSEPKTHNENAPWIRQEEEKHQHIAKQGDVILTPEEIAETIKHTHNWKCPGVDSVQNFWYKQFSATYQMLTDQINKAILQPNRLPKFLTQGITYIKPKNADTKNPANYRPITCLPTLYKIITATIGKRIEQHLNQNNILTEEQKGCRKQSQGCKEQLIIDSVIMEQARKEHRNLHTCFIDYKKAFDSVPHSWLMKTLQIYKINPALRQFLSRTMETWRTNIHLKTQDGHIQTEELYIRRGIYQGDSLSSLWFCLCLNPLSNALNNTNYGFNIRHQKVNQHRINHLLYMDDIKLYTSTEVQLKELLRITEVCTSDVRMEFGMSKCKVLHIQKGQWKNHSEQETLTGQTLDNMDKDETYKYLGFNQSIKIDHSEVKAQLTQEFRDRLVRLLKTKLNSKNLTKAINTFAIPVLTYSFGIVKWSHTDIENINILIRTEMTKHRMAHPKACKERLTIDRKQGGRGIIDIQSLHTRQIKMLRDFFQNKQTKLHRSIVKADKNYTPLTLSSPDHSADTHNHMELQQQKINTWSQKALHGKHRYRVTQEHINEKQSYTWLQDGQLFPETEGFMLAIQDQVIATRNYMKYIIKDTSITDDNCRKCHQQKETIDHITSACKTLAGNEYTARHNSAAKVIHQALATTNKLIENTDPYYNYTPTSVLENNEYKLYWDVEIHTDKTIPANRPDIVFQSKADKVTYLIDIAIPNDTNIQNAYSGKISKYTDLAIEVKRLWKQNKVVIVPLIMSVSGLTPNTFTPHLQQLGLDERLHKIFQKSVILKTCNIVRSFLNSDP

SEQ ID NO: 32353 - protein, 1242 aa, Callosobruchus maculatus
MHKVTSKNNQRRPRVRRLNSPEPQTQTEQPRQHNPAADVLPAQPATTKAGKPRQRLQWTTEINKHVMHCYYTATQLETISTGYRHELHRLFIAQYPHLAERVTEQRLIDQKRVITKNNRLTPEELQAIKILVSNEINTAHPNHPQTSNRTTIDNTSIHSETDPEHEHTQHIPDSAVQPNDSLATESITERHAIRTRNNQPPNTGTTNTTSIHLELDLENDHTPETTCTNLPSTATQSQNITLPPAITQSAEQVMNTQYNKWCGTNPTLRDPLPRLIFKNNTLQILHTINVNIIPQFLTKDSDLEDIHTVIYAAAATALTLNGQRLPKRSIARTTERSKPKWQIRIENKISTIRKDLAHLAQYTNNNNRSKRVQTTINILESKSPQQTIPEIADTLKQKLAVYAARLRRYNESNARKDANNLFQKSEKQFYQKITADNQITAIGPPSKQELTEFWGSLWSEPKTHNENAPWIRQEEEKHQHIVEQEDVILTPEEIAETIKHTHNWKCPGVDNVQNFWYKQFSATYEMLTDQINKAILQPNRLPKFLTQGITYIKPKNADTKNPANYRPITCLPTLYKIITATICRRIEQHLTQNNILTEEQKGCRKQSQGCKEQLIIDSVIMEQTRKEHRNLHACFIDYKKAFDSVPHSWLAKTLQIYKINLGLREFLTSTMETWRTSIHLKTQDGLIKTDELHIRRGIFQGDSLSSLWFCLCLNPLSNALNNTNCGFNIRHDRLNQHKINHLLYMDDIKLYAANEVQLKELIRTTEACSSDIRMEFGMSKCKVLHINKGLWKDHPQQETVAGQTLNNMNKDETYKYLGFNQNVKIDHTQVKAQLTQEFRDRLIKLLKTKLNSRNLTKAINTFAIPVLTYSFGIIKWSHTDIENIHILIRTELTKHRMSHPNACKERLTIGRKQGGRGITDIQSLRTRQIKTLRHFFQNKQTNLHRAIVKADKNYTPLNLSCPDHVADTHNPTQSQQEKISTWSQKPLHGKHRYRITQDHINEKQSYTWLQDGQLFPETEGFMLAIQDQVIATRNYKKYVIKDPSITNDNCRKCQQQKETIDHITSACKTLAGTEYTARHNSAAKIIHQALATKNKLIENSDPYYKYTPTSVLENDHYKLYWDVEIHTDKTINANRPDIVFQIKADKVTYLIDIAIPNDVNVQNTYAGKISKYTDLAIEVKRIWKQDKVIIVPFIMSVSGLTPNTFTQHLQQLGLDESLHKIFQKSVILKTCNIVRSFLNSDQ

SEQ ID NO: 32354 - protein, 896 aa, Callosobruchus maculatus
MNTQYNKWCGTNPTLRDPLPRLIFKNNTRQILQTVNSNIIPQFLTKDSNLEHIHTVIYAAAATTLIVNGQKLPKRSKDHTSKRSKPKWQIRIENKISTIRKDLAHVTQYIHKNNLSKRIQTTISRLKSRSPQQTISEIYDTLKQKLAVYAARLRRYNESNDRKDTNNLFQKSERQFYQKITSNNQITTLEPPSRKELTDFWGSLWSEPKTHNENAPWIRQEEEKQQHIPEQGDVILTPQEIEETIKHTHNWKCPGVDNVQNFWYKQFSATYEMLTDQINKAILQPNRLPKFLTQGVTYIKPKNADTKNPANYRPITCLPTLYKIITATIGKRIEQHLTQNNILTEEQKGCRKQSQGCKEQLIIDSVIMEQTRKEHRNLHTCFIDYKKAFDSVPHSWLTKTLQIYKINPTLRQFLTRIMETWRTNIHLKTQDGHIQTEELYIRRGIFQGDSLSSLWFCLCLNPLSNALNSTNYGFNIRHQKVNQHRISHLLYMDDIKLYAATEVQLKELLKITEVCTSDVRMEFGMSKCKVLHIHKGQWKNHSEQEILTGETLDNMEKDETYKYLGFNQNIKIDHSEVKAQLTQELRDRLITLLKTKLNSKNLTKAINTFAIPVLTYSFGIIKWSHTDIENINILIRTELTKHRMSDPKACKERLTIDRKHGGRGIIDIQSLHTRQIKTLRDFFQSKETNLHRSIVKADKNYTPLTLSRPDHPADAHNHIELQQEKINTWSQKALHGKHRYRVTQDHINERQSYTWLQDGQLFPETEGFMLAIQDQVIATRNYMKYIINDTSVTDDNCRKCHQQKETIDHITSACKTLAGTEYTARHNSAAKVIHQALATTNKLIENTDPYYNYTPTSVLENNEYKLYWDVEIRTDKTIPANRPDIVFQSKADKVTY

SEQ ID NO: 32355 - protein, 717 aa, Callosobruchus maculatus
MLTDQINKAILQPNRLPKFLTQGMTYIKPKNADTKNPANYRPITCLPTLYKIITATICRRIEQHLTQNNILTEEQKGCRKQSQGCKEQLIIDNVIMEQTRKEHRNLHTCFIDYKKAFDSVPHSWLAKTLQIYKINPGLREFLTRTMETWRTSIHLKTQNGHIKTDELHIRRGIFQGDSLSSLWFCLCLNPLSNALNNTNCGFNIRHEKLNQHRINHLLYMDDIKLYAANEVQLRKLIRITETCSSDVRMEFGLSKCKVLHINKGQWKDHPQQETVAGQTLNNMNKDETYKYLGFNQNVKIDHTQVKAQLTQEFRDRLIKLLKTKLNSRNLTKAINTFAIPVLTYSFGIIKWSHTDIENIHILIRTELTKHRMSHPNACKERLTLNRKQGGRGITDIQSLRTRQIKTLRHFFQNKQTNLHRAIVKADKNYTPLNLSCPDHVADTHNPTQSQQEKISAWSQKPLHGKHRYRITQDHINEKQSYTWLQDGQLFPETEGFMLAIQDQVIATRNYKKYVIKDPSITDDNCRKCHQQKETIDHITSGCKTLAGTEYTARHNSAAKVIHQALATTNKLIENSDPYYNYTPTSVLENDQYKLYWDVEIHTDKTIPANRPDIVFQSKADKITYLIDIAIPNDVNIQNTYAGKISKYTDLAMEIKRLWKQNKVTIVPLIMSVSGLTPNTFTQHLQQLGLDEKLHKVFQKSVILKTCNIVRSFLNSDQ

SEQ ID NO: 32356 - protein, 622 aa, Callosobruchus maculatus
MEQTRKEHRNLHTCFIDYKKAFDSVPHSWLTKILQIYKISPGLRQFLAKTMKTWRTNIHLTTQDGHIQTEELHIRRGIFQGDSLSSLWFCLCLNPLSNALNNTNYGFNIRHQKVNQHRINHLLYMDDIKLYAATDVQLRELLRITKVYTSDVRMEFGMNKCKVLHINKGQWKNHPEQEIVTGQTLDNMDKEETYKYLGINQSVKIDHTQIKAELRQVFRDRLIKLLKTKLNSRNLTKAINTFAIPILTYSFGIIKWSHTDIENIHILIRTELTKHRMSHPNACKERLTIDRTQGGRGITDIQSLRTRQIKTLRHFFQNKQTNLHRAIVKADKNYTPLNLSCPDHVADTHNPTQSQQEKISTWSQKPLHGKHRYRVTQDHINKKQSYTWLQDGQLFPETEGFMLAIQDQVIATRNYKKYIIKDPSITDDNCRKCQQQKETIDHITSGCKTLAGTEYTARHNSAAKVIHQALATTNKLIENTDPYYNYTPTSVLENDQYKLYWDVQIHTDKTIPANRPDIVFQSKLDKVTYLIDIAIPNDVNIQNTYAGKISKYTDLAMEIKRLWKQDKVTIVPLIMSVSGLTPNTFTPHLQQLGLDEKLHKTFQKSVILKTCNIVRSFLNSDQ

SEQ ID NO: 32357 - protein, 622 aa, Callosobruchus maculatus
MEQTRKEHRNLHTCFIDYKKAFDSVPHSWLTKTLQIYKINPTLRQFLTRTMETWRTNIHLKTQDGHIQTEELCIRRGIFQGDSLSSLWFCLCLNPLSNALNNTNYGFNIRHQKVNQHRISHLLYMDDIKLYAATEVQLKELLKITEVCTSDVRMEFGMSKCKVLHIHKGQWKNHSEQEILTGQTLDNMEKDETYKYLGFNQNIKINHSEVKAQLTQEFRDRLITLLKTKLNSKNLTKAINTFAIPVLTYSFGIIKWSHTDIENINILIRTELTKHRMSHPKACKERLTIDRKYGGRGIIDIQSLHTRQIKTLRDFFQSKETNLHRSIVKADKNYTPLTLSRPDHPADAHNHIELQQEKINTWSQKALHGKHRYRVTQDHINERQSYTWLQDGQLFPETEGFMLAIQDQVIATRNYMKYIIKDTSITDDNCRKCHQQKETIDHITSACKTLAGTEYTARHNSAAKVIHQALATTNKLIDNTDPYYNYTPTSVLENNEYKLYWDVEIHTDKTIPANRPDIVFQSKADKVTYLIDIAIPNDTNIQNAYAGKISKYTDLAIEIKRLWKQNKVTIVPLIMSVSGLTPNTFTPHLQQLGLDERLHKIFQKSVILKTCNIVRSFLNSDP

SEQ ID NO: 32358 - protein, 989 aa, Callosobruchus maculatus
MNIQFNKWCGTNPTLRDPLPRLIFKNNTQQILHSINANVIPQFITNDSTLEDIHTVIYAAAATTLILNGQKLPKRSTDHTTERSKPKWQIRIENKISAIRKDLAHLAQYTNNNNPSKRVQRTVNILKSKSPQQTVPEIADTLKQKLAVYAARLRRYNESNARKDANNLFQKSEKQFYQKITSDNQITTIEPPSKQELTEFWGSLWSEPKTHNEDAPWIKQEEQKHQHIEEQGDIILTPEEIAETIKHTHNWKCPGVDNIQNFWYKQFSATYEMLANQVNKAIIQPERFPKFLTQGITYIKPKNADTKNPANYRPITCLPTLYKIVTATICRRIEQHLTQNSILTEEQKGCRKQSQGCKEQLIIDSVIMEQTRKEHRSLHTCFIDYKKAFDSVPHSWLTKILQIYKINPGIRRFLTRTMETWRTNIHLKTQDGHIQTEELNIRRGIFQGDSLSSLWFCLCLNPLSNALNSTNYGFNIRHQKANQHRINQLLYMDDIKLYAATDVQLRELLRITEVCTSDVRMEFGMSKCKVLHINKGQWKNHPQQEIVTGQTLDNMDKEETYKYLGFNQSVKIDHTQTKAQIRQVFRDRLIKLLKTKLNSRNLTKAINTFAIPILTYSFGIIKWSHTDIENIHILIRTELTKHRMSHPNACKERLTIDRKQGGRGIIDIQSLHSRQIKTLRHFFQSKQTNLHRSIVKADKNYTPLNLSCPDHAADTYNHIQSQQEKINTWSQKALHGKHRYRVTQDHINERQSYTWLHDGQLFPETEGFMLAIQDQVIATQNYKKYIIKDPSITDDNCRKCHQQKETIDHITSGCKTLAGNEYTARHNSAAKVIHQALATTNKLIENTDPYYNYTPTSVLENNQYKLYWDVEIHTDKTIPANRPDIVFQSKLDKVTYLIDIAIPNDVNIQNTYAGKISKYTDLAMEIKRLWKQDKVTIVPFIMSVSGLTPNTFTPHLQQLGLDERLHKTFQKSVILKTCNIVRSFLNSDQ

SEQ ID NO: 32359 - protein, 1245 aa, Callosobruchus maculatus
MHRVTSKNNQRRPRVRRLNSPEPQTQTEQPIERNPAADVLPAQPATTKAGKPRQRLQWTTEINKSVMHCYYTATKLETISTGYRHELHRLFIAQYPHLAERVTEQRLIDQKRVITKNNRLTPEELQAIKILVSNEINTPHQNDPQTSNTTTSDNTTIPTEIDPEHEHTQDIPDNAVQPNDSLAIESITERHTIHTRNNQPSNKDTTNNTNIHFEIDPEHNHAPHTPETTCTNLPSTATQSQNITLPPAITQFAKQVMNTQYNKWCGTNPVLRDPLPRLIFKNNTRQILHTINANIIPQFLTDDSDLEDIHTVIYAAAATTLIVNGQKLPQRSKTHTSKRSKPKWQIRIENRISTLRKDLAHLTQYTNNNNLSKRIQTTINRLKSKSPQQTIPEIADTLKQKLAVYAARLRRYNESNDRKDANNLFQRSEKQFYQKMTSNNQITTTEPPSRQELTEFWGSLWSEPKTHNENAAWIRQEEEKHQHIAEQGDIVLTPEEIAETIKHTHNWKCPGVDNVQNFWYKQFSATYEMLTEQINKAILQPNRLPKFLTQGITYIKPKNADTRNPANYRPITCLPTLYKIITATIGKRIEQHLTQNNILTEEQKGCRKQSQGCKEQLIIDSVIMEQTRKEHRNLHTCFIDYKKAFDSVPHSWLKKTLQIYKINPVLRQFLTRTMETWRTNIHLKTQDGHIQTEDLLIRRGIFQGDSLSSLWFCLCLNPLSNALNNTNYGFNIRHQKVNQHRINHLLYMDDIKLYAATEVQLKELLRITEVCTSDVRMEFGMSKCKVLHINKGQWKNQAEQEILTGQTLDNMDKDETYKYLGFNQNIKIDHTQVKAQLTQEFRDRLVKLLKSKLNSKNLTKAINTFAIPVLTYSFGIIKWSHTDIENIHILIRTELTKHRMSHPNACKERLTIDRKQGGRGIIDIQSLRARQIKTLRQFFQSKQTNLHRAIAKADKSYTPLNLSCLDHAADTHNPIQSQQEKINTWSQKPLHGKHRYRITQDQINEKQSYTWLQDGQLFPETEGFMLAIQDQVIATRNYKKYVIKDPSITNDNCRKCHQQKETIDHITSACKTLAGTEYTARHNSAAKIIHQALATKNKLIDNSDPYYKYTPTSVLENDHYKLYWDVEIHTDKTINANRPDIVFQTKADKVTYLIDIAIPNDVNVQNTYAGKISKYTDLAIEVKRLWKQDKVIIVPLIMSVSGLTPNTFTQHLQQLGLDEGLHKIFQKSVILKTCNIVRSFLNSDQ

SEQ ID NO: 32360 - protein, 989 aa, Callosobruchus maculatus
MNIQFNKWCGTNPTLRDPLPRLIFKNNTQQILHSINANVIPQFITNDSTLEDLHTVIYAAAATTLILNGQKLPKRSTDYTTERSKPKWQIRIENKISAIRKDLAHLAQYTNNNNPSKRVQRTVNILKSKSPQQTVPEIADTLKQKLAVYAARLRRYNESNARKDANNLFQKSEKQFYQKITSDNQITTIEPPSKQELTEFWGRLWSEPKTHNEDAPWIKQEERKHQHIEEQGDIILTPEEIAETIKHTHNWKCPGVDNIQNFWYKQFSATYEMLANQINKAIIQPERFPKFLTQGITYIKPKNADTKNPANYRPITCLPTLYKIVTATICRRIEQHLTKNSILTEEQKGCRKQSQGCKEQLIIDSVIMEQTRKEHRSLHTCFIDYKKAFDSVPHSWLTKILQIYKINPGIRRFLTRTMETWRTNIHLKTKDGHIQTEELNIRRGIFQGDSLSSLWFCLCLNPLSNALNSTNYGFNIRHQKANQHRINHLLYMDDIKLYAATDVQLRELLRITEVCTSDVKMEFGMSKCKVLHINKGQWKNHPQQEIVTGQTLDNMDKEETYKYLGFNQSVKIDHTQTKAQLRQVFRDRLIKLLKTKLNSRNLTKAINTFAIPILTYSFGIIKWSHTDIENIHILIRTELTKHRMSHPNACKERLTIDRKQGGRGIIDIQSLHSRQIKTLRHFFQSKQTNLHRSIVKADKNYTPLNLSCPDHAADTYNHIQSQQEKINTWSQKALHGKHRYRVTQDHVNERQSYTWLHDGQLFPETEGFMLAIQDQVIATQNYKKYIIKDPSITDDNCRKCHQQKETIDHITSGCKTLAGTEYTARHNSAAKVIHQALATTNKLIENTDQYYNYTPTSVLENNQYKLYWDVEIHTDKTIPANRPDIVFQSKLDKVTYLIDIAIPNDVNIQNTYAGKISKYTDLAMEIKRLWKQDKVTIVPFIMSVSGLTPNTFTPHPQQLGLDERLHKTFQKSVILKTCNIVRSFLNSDQ

SEQ ID NO: 32361 - protein, 1245 aa, Callosobruchus maculatus
MHRVTSKNNQRRPRVRRLNSPEPQTQTEQPIERNPAADVLPAQPATTKAGKPRQRLQWTTEINKSVMHCYYTATKLETISTGYRHELHRLFIAQYPHLAERVTEQRLIDQKRVITKNNRLRPEELQAIKILVSNEINTPHQNDPQTSSTTTSDNTTIPTEIDPEHEHTQDIPDNAVQPNDSLAIESMTEGHTIHTRNNQPPNKDTTNNTSIHFEIGPEHNHAPHTPETTCTNLPSTATQSQNITLPPAITQSAKQVMNTQYNKWCGTNPVLRDPLPRLIFKNNTRQILHTINANIIPQFLTNDSDLEDIHTVIYAAAATTLIVNGQKLPQRSKTHTSKRFKPKWQIRIENKISTLRKDLAHLTQYTNNNNLSKRIQTTINRLKSKSPQQTIPEIADTLKQKLAVYAARLRRYNESNDRKDANNLFQRSEKQFYQKMTSNNQITTTEPPSRQELTEFWGSLWSEPKTHNENAAWIRQEEEKHQHIAEQGDIVLTPEEIAETIKHTHNWKCPGVDNVQNFWYKQFSATYEMLTQQINKAILQPNRLPNFLTQGITYIKPKNADTRNPANYRPITCLPTLYKIITATIGKRIEQHLTQNNILTEEQKGCRKQSQGCKEQLIIDSVIMEQTRKEHRNLHTCFIDYKKAFDSVPHSWLKKTLQIYKINPVLRQFLTRTMETWRTNIHLKTQNGHIQTEKLLIRRGIFQGDSLSSLWFCLCLNPLSNALNNTNYGFNIRHQKVNQHRINHLLYMDDIKLYAATEVQLKELLRITEVCTSDVRMEFGVSKCKVLHVNKGQWKNQAEQEILTGQTLDNMDKDETYKYLGFNQNIKIDHTQVKAQLTQEFRDRLVKLLKSKLSSKNLTKAINTFAIPVLTYSFGIIKWSHTDIENIHILIRTELTKHRMSHPNACKERLTIERKQGGRGIIDIQSLRARQIKTLRQFFQSKQTNLHRAIAKADKSYTPLNLSCLDHAADTHNPIQSQQEKINTWSQKPLHGKHRYRITQDQINEKQSYTWLQDGQLFPETEGFMLAIQDQVIATRNYKKYVIKDPSITNDNCRKCHQQKETIDHITSACKTLAGTEYTARHNSAAKIIHQALATKNKLIDNSDPYYKYTPTSVLDNDHYKLYWDVEIHTDKTINANRPDIVFQTKADKVTYLIDIAIPNDVNVQNTYAGKISKYTDLAIEVKRLWKQDKVIIVPLIMSVSGLTPNTFTQHLQQLGLDEGLHKIFQKSVILKTCNIVRSFLNSDQ

SEQ ID NO: 32362 - protein, 1245 aa, Callosobruchus maculatus
MHRVTSKNNQRRPRVRRLNSPEPQTQTEQPIERNPAADVLPAQPTTTKAGKPRQRLQWTTEMNKSVMHCYYTATRLETISTGYRHELHRLFIAQYPHLAERVTEQRLIDQKRVITKNNRLTPEELHAIKILVSNEVNTVRQNDPQTSNTTTSNNTTIPTEIDPEQEHTQDRPDTAVQPNDSLAIESITEGHTIHTRNNQPPNKDTTNDTSIHLEIDPEHDHAPHTPETTCSNLPSTATQSQNITLPPAITQSAKQVMNTQYNKWCGTNPVLRDPLPRLIFKNNTRQILHTINANIIPQFLTNDSDLEDIHTVIYAAAATTLIVNGQKLPKRSKNHTSKRSKPKWQIRIENKISTLRKDLAHVTQYTNNNNLSKRIQTTINRLKSKSPQQTIPEIADTLKQKLAVYAARLRRYNESNDRKDANNLFQKSEKQFYQKMTSNNQITTTEPPSRQELTEFWGSLWSEPKTHNENAPWIRQEEEKHQHIVEQADVVFTPDEIAETIKHTHNWKCPGVDNVQNFWYKQFSATYEILTEQINKALLQPNRLPKFLTQGITYIKPKNGDTRNPANYRPITCLPTLYKIITATIGKRIEQHLTQNNILTEEQKGCRKQSQGCKEQLIIDSVIMEQTRKEHRNLHTCFIDYKKAFDSVPHSWLTKTLQIYKINPVLRQFLTRTMETWRTNIHLKTQDGHIQTEELLIRRGIFQGDSLSSLWFCLCLNPLSNALNNTNYGFNIRHQKVNQHRINHLLYMDDIKLYAATEVQLKELLRITEVCTSDVRMEFGMSKCKVLHINKGQWKNQSEQEILTGETLDNMDKDETYKYLGFNQNIKIDHTQVKAQLTQEFRNRLLKLLKSKLNSKNLTKAINTFAIPVLTYSFGIIKWSHTDIENIHILIRTELTKHRMSHPNACKERLTIDRKQGGRGIIDIQSLRTRQIKTLRDFFQSKQTNLHRSIVKADKNYTPLNLSRSDHSADGHNHIELQQEKINTWSQKALHGKHRYRVTQDHINERQSYTWLQEGQLFPETEGFMLAIQDQVIATRNYMKYIIKDTSITDDNCRKCHQQKETIDHITSGCKTLAGTEYTARHNSAAKVIHQALATTNKLIENTDPYYNYTPTSVLENNEYKLYWDVEIHTDKTIPANRPDIVFQSKADKVTYLIDIAIPNDTNIQNTYAGKISKYTDLAIEIKRLWKQNKVTIVPLIMSVSGLTPNTFTPHLQQLGLDEKLHKIFQKSVILKTCNIVRSFLNSDP

SEQ ID NO: 32363 - protein, 897 aa, Callosobruchus maculatus
MRIENKITTIRKELAHLAQYTNNNNRSKRIQTTIDILKSKSPQKSIPEITDTLKQKLAVYAARLRRYNESNDRKDANNLFQKSEKQFYKKITTDNQVTAVELPSKQELTEFWGSLWSEPKTHNENAPWIRQEEEKHQHIVEQGNVILTPEEIAETIKHTHNWKCPGVDNIQNVWYKQFSSVYEVLTDQIHKAILQPNRLPKFLTQGITYIKPKNADTKNPANYRPITCLPTLYKIITATICRRIEKHLTENSILTEEQKGCRKQSQGCKEQLIIDSVITEQTRKEHRNLHTCFIDYKKAFDSVPHSWLTKTVQIYKINPGLRQFLTRTMETWRTNIHLQTEDGHIQTDELHIRRGIFQGDSLSSLWFCLCLHPLSNTLNSTNCGFTIRHQKANQHKINHLLYMDDLKLYAATEVQLRELLRITEACTSDIKMEFGMSKCKVLHINKGQWKNHPEQEVVTGQALDNMDKDETYKYLGINQNAKIDHTKIKSQLTQEFKDRLIRLLKTKLNSRNLTKAINTFAIPILTYSFGIIKWSHTDIENIHILIRTELTKHRMSHPKACKERLTIDRKQGGRGIIDIQSLHAKQIKSLRHFFHSKQTNLHKAIIKADKNYTPLALSCPDHAADAHNHTQAQQEKINTWSQKALHGKHRYRVSQDYINEKQSYTWLQDGQLFPETEGFMLAIQDQVIATRNYRKYIMKDPSISDDNCRKCHQQKETIEHITSGCKTLAGTEYTARHNSAAKVIHQALATTNKLIENTDPYYNYTPTSVLENNQFKLYWDIEIHTDKTIPANRPDIVFQSKTDKVTYLIDIAIPNDMNIQNTYAGKISKYTDLAIEIKRLWKQNKVVIVPLIMSVSGLTPFTPHLQQLGLDEKLHKTFQKSVILKTCSIVRSFLNSE

SEQ ID NO: 32364 - protein, 972 aa, Callosobruchus maculatus
MPRLIFKNNTQQILHTVNANVIPQFIRDDTNLEDIHTVIYAAAATTLIVNGQKLSKRSKHQTSNRTKPKWQIRIENKISTIRKDLAHLAQYTINNNHPSRHIQRTINILKSKSPQQTIPEITDTLKQKLAVYAARLRRYHESNARKDANSLFQKSEKQFYQKITADNQITTIEPPSKQELTEFWGSLWSEPKTHNEDAPWIREEEEKHQHIAEQGDVILSTEEIVETIKHTHDWKCPGVDNVQNFWYKHFSSTYEVLTNQINKAIRQPDRLPKFLTQGITYIKPKNADTKNPANYRPITCLPTLYKIITATLCRRIEQHLTQNNILTEEQKGCRKQSQGCKEQLVIDSVIMEQTRKEHRNLHTCFIDYKKAFDSVPHSWLTEILQIYKINPGLRQFLAKTMKTWRTNIHLTTQDGHIQTEELHIRRGIFQGDSLSSLWFCLCLNPLSNALNNTNYGFNIRHQKVNQHRINHLLYMDDIKLYAATDVQLRELLRITEVYTSDVRMEFGMNKCKVLHINKGQWKNHPEQEIVTGQTLDNMDKEETYKYLGFNQSVKIDHTQIKAELRQVFRDRLIKLLKTKLNSRNLTKAINTFAIPILTYSFGIIKWSHTDIENIHILIRTELTKHRMSHPNACKERLTIDRTQGGRGITDIQSLRTRQIKTLRNFFQNKQTNLHRAIVKTDKNYTALNLSCPDHVADTHNPTQSQQEKISTWSQKPLHGKHRYRVTQDHINKKQSYTWLQDGQLFPETEGFMLAIQDQVIATRNYKKYIMKDPSITDDNCRKCQQQKETIDHITSGCKTLAGTEYTARHNSAAKVIHQALATTNKLIENTDPYYNYTPTSVLENDQYKLYWDVQIHTDKTIPANRPDIVFQSKLDKVTYLIDIAIPNDVNIQNTYAGKISKYTDLAMEIKRLWKQDKVTIVPLIMSVSGLTPNTFTPHLQQLGLDEKLHKTFQKSVILKTCNIVRSFLNSDQ

SEQ ID NO: 32365 - protein, 1241 aa, Callosobruchus maculatus
MHKVTSKNNQRRPRVRRLNSPEPQAQTEQPIERNPAADVLPAQMATTKAGKPRQRLQWTTEINKSVMHCYYTATKLETISTGYRHELRRLFIAQYPHLAERVTEQRLIDQKRVITKNNRLTPEELQAIKVLVSSEMNTAYPNDLQTSNITTTANTSIHLEIDPEHEHTQDIPDTAVQPNDSLAIETITEGHAIHSRNNQPPNKDTTNNTSIHLEIDPEHDHTPETTCTSLPSTTTQNQNITIPAVITQSAEQVMYTQYNKWCGTNPVLRDPMPRLIFKNNTRQILHTINANIIPQFLTNDSDLEDIHTVIYAAAATTLIVNGQKLPKRSKNHTNKRSKPRWQIRIENKISTLRKDLAHLTQYTNNNNLSKRIQTTIDRLKSKSPQQTIPEIADTLKQKLAVYAARLRRYNESNDRKDANNLFQKSEKQFYQKITSTTQITTIEPPTRQELTEFWGNLWSEPKTHNDNAPWIRQEEEKQQHIPEQGDVILTPQEIAETIKHTHNWKCPGVDNVQNFWYKQFTATYELLTNQINKALLQPNRLPKFLTQGITYIKPKNADTRNPANYRPITCLPTLYKIITATIGKRIEQHLTQNSILTEEQKGCRKQSQGCKEQLIIDSVIMEQTRKEHRNLHTCFIDYKKAFDSVPHSWLKKTLVIYKINPGLRQFLTTTMETWRTNIYLQTEDGHIQTDELHIRRGIFQGDSLSSIWFCLCLNPLSNTLNDTNCGFTIRHQKVNLHKINHLLYMDDIKLYAATEVQLRELLRITEVCTSDMRMEFGMSKCKVLHINKGQWKNHPQQEVVTGQTLDNMDKDETYKYLGFNQNVKIDHTQVKAQLTREFKDRLTRLLKTKLNSRNITKAINTFAIPVLTYSFGIIKWSHTDIENIHILIRTEFTKHRMSHPNACKERLNIDRKQGGRGIIDIHSLHTKQIKTLRYFFHSKQTNLHKAIVKADKNYTPLALSCPDHAADAHDHIQSQQEKINTWSQKALHGKHRYRVTQDHINKNQSYTWLQDGQLFPETEGFMLAIQDQVIATRNYKKYIIKDPSITDDSCRKCHQQKETIEHITSGCKTLAGTEYTARHNSAAKVIHQALATTNKLTENTDPYYNYTPTSVLENNKFKLYWDIEIHTDKTIPANRPDIVFQSKADKVTYLIDIAIPNDMNIQSTYTGKISKYTDLAIEIKRLWKQDKVIIVPLIMSVSGLTPNTFTPHLQQLGLDEKLHKTFQKSVILKTCSIVRSFLNSE

SEQ ID NO: 32366 - protein, 1143 aa, Callosobruchus maculatus
MRCYYTATKLETISTGYRHELHRLFTTQYPHLSTRVTEQRLIDQKRVITKNNRLTPQELQDIKNLVSNEMNIVQPNDSLTTEQIVETQKSDTQTSQISNTAKTNNTSIHSELGPEHDQALDTPDTTITNPPSTIIQIQNITRPFAVTQSVEQVMSTQYNKWCGTNPALRDPLPRLIFKNNTQQILHTVNANVIPQFIRDDSNLEDIHTVIYAAAATTLIVNGQKLSKRCKHQTSNRTKPKWQIRIENKISTIRKDLAHLAQYTINNNHPSRHIQRTINILKSKSPQQTIPEITDTLKQKLAVYAARLRRYNESNARKDANSLFQKSEKQFYQKITADNQIATIEPPSKQELTEFWGSLWSEPKTHNEDAPWIREEEEKHQHIAEQGDVILSKEEIVETIKHTHDWKCPGVDNVQNFWYKHFSSTYEVLTNQINKAIRQPDWLPKFLTQGITYIKPKNADTKNPANYRPITCLPTLYKIITATLCRRIEQHITQNNSLTEEQKGCRKQSQGCKEQLIIDSVIMEQTRKEHRNLHTCFIDYKKAFDSVPHSWLTKILQIYKINPGLRQFLAKTMKTWRTNIHLTTQDGHIQTGELHIRRGIFQGDSLSSLWFCLCLNPLSNALNNTNYGFNIRHQKVNQHRINHLLYMDDIKLYAATDVQLRELLRITEVYTSDVRMEFGMNKCKVLHINKGQWKNHPEQEIVTGQTLDNMDKEETYKYLGFNQSVKIDHTQIKAELRQVFRDRLIKLLKTKLNSRNLTKAINTFAIPILTYSFGIIKSSHTDIENIHILIRTELTKHRMSHPNACKERLTIDRTQGGRGITDIQSLRTRQIKTLRHFFQNKQTNLHRAIVKADKNYTPLNLSCPDHVADTHNPTQSQQEKISTWSQKPLHGKHRYRVTQDHINRKQSYTWLQDGQLFPETEGFMLAIQDQAIATRNYKKYIIKDPSITDDNCRKCQQQKETIDHITSGCNTLAGTEYTARHNSAAKVIHQALATTNKLIENTDPYYNYTPTSVLENDQYKLYWDVQIHTDKTIPANRPDIVFQSKLDKVTYLIDIAIPNDVNIQNTYAGKISKYTDLAMEIKRLWKQDKVTIVPLIMSVSGLTPNTFTPHLQQLGLDEKLHKTFQKSVILKTCNIVRSFLNSDQ

SEQ ID NO: 32367 - protein, 989 aa, Callosobruchus maculatus
MNTQYNKWCGTNPTLRDPLPRLIFKNNTRQILQTVNSNIIPQFLTKDSNLEDIHTVIYAAAATTLIVNGQKLPKRSKDHTSKRSKPKWQIRIENKISTIRKDLAHVTQYIHKNNLSKRIQTTISRLKSRSPQQTISEIYDTLKQKLAVYAARLRRHNESNDRKDTNNLFQKSERQFYQKITSNNQITTIEPPSRKELTDFWGSLWSEPKTHNENAPWIRQEEEKQQHIPEQGDVILTPQEIAETIKHTHNWKCPGVDNVQNFWYKQFSATYEMLTDQINKAILQPNRLPKFLTQGVTYIKSKNADTKNPANYRPITCLPTLYKIITATIGKRIEQHLTQNNILTEEQKGCRKQSQGCKEQLIIDSVIMEQTRKEHRNLHTCFIDYKKAFDSVPHSWLTKTLQIYKINPTLRQFLTRIMETWRTNIHLKTQDGHIQTEELYIRRGIFQGDSLSSLWFCLCLNPLSNALNNTNYGFNIRHQKVNQHRISHLLYMDDIKLYAATEVQLKELLKITEVCTSDVRMEFGMSKCKVLHIHKGQWKNHSEREILTGETLDNMEKDETYKYLGFNQNIKIDHSEVKAQLTQEFRDRLITLLKTKLNSKNLTKAINTFAIPVLTYSFGIIKWSHTDIENINILIRTELTKHRMSHPKACKERLTIDRKHGGRGIIDIQSLHTRQIKTLRDFFQSKETNLHRSIVKADKNYTPLTLSRPDHPADAHNHIELQQEKINTWSQKALHGKHRYRVTQEHINERQSYTWLQDGQLFPVTEGFMLAIQDQVIATRNYMKYIIKDTSITDDNCRKCHQQKETIDHITSACKTLAGTEYTARHNSAAKVIHQALATTNKLIENTDPYYNYTPTSVLENNEYKLYWDVEIHTDKTIPANRPDIVFQSKADKVTYLIDIAIPNDTNIQNAYAGKISKYTDLAIEIKRLWKQNKVTIVPLIMPVSGLTPNTFTPHLQQLGLDERLHKIFQKSVILKTCNIVRSFLNSDP

SEQ ID NO: 32368 - protein, 1164 aa, Callosobruchus maculatus
MHCYYTATQLETISTGYRHELHRLFIAQYPHLAERVTEQRLIDQKRVITKNNRLTPEELQAIKILVSNEINTAHPNHPQTSNRTTIDNTSIHSETDPEHEHTQHIPDSAVQPNDSLATESITERHAIRTRNNQPPNTGTTNTTSIHLELDLENDHTPETTCTNSPSTATQSQNITLPPAITQSAEQVMNTQYNKWCGTNPTLRDPLPRLIFKNNTLQILHTINVNIIPQFLTKDSDLEDIHTVIYAAAATALTLNGQKLPKRSIARTTERSKPKWQIRIENKISTIRKDLAHLAQYTNNNNRSKRVQTTINMLKSKSPQQTIPEIADTLKQKLAVYAARLRRYNESNARKDANNLFQKSEKQFYQKITADNQITAIEPPSKQVLTEFWGSLWSEPKTHNENAPWIRQEEEKHQHIVEQEDVILTPEEIAETIKHTHNWKCPGVDNVQNFWYKQFSATYEMLTDQINKAILHPNRLPKFLTQGITYIKPKNADTKNPANYRPITCLPTLYKIITATICRRIEQHLTQKSILTEEQKGCRKQSQGCKEQLIIDSVIMEQTRKEHRNLHTCFIDYKKAFDSVPHSWLAKTLQIYKINPGLREFLASTMETWRTSIHLKTQDGLIKTDELHIRRGIFQGDSLSSLWFCLCLNPLSNALNNTNCGFNIRHDRLNQHKINHLLYMDDIKLYAANEVQLKELIRTTEACSSDVRMEFGMSKCKVLHINKGQWKDHPQQETVAGQTLNNMNKDETYKYLGFNQNVKIDHTQVKAQLTQEFRERLIKLLKTKLNSRNLTKTINTFAIPVLTYSFGIIKWSHTDIENIHILIRTELTKHRMSHPNACKERLTIDRKQGGRGIVDIQSLRTRQIKTLRHFFQNKQTNLHRAIVKADRNYTPLNLSCPDHAADTHNPTQSQQEKINTWSQKPLHGKHRYRITQDHINEKQSYTWLQDGQLFPETEGFMLAIQDQVIATRNYKKYIIKDPSITEDSCRKCHQQKETIDHITSGCKVLAGTEYTARHNSAAKVIHQALATANKLIENTDPYYNYTPTSVLENDRYKLYWDVEIHTDKTIPANRPDIVFQSKADKITYLIDIAIPNDVNVQNTYAGKISKYTDLAMEIKRLWKQNSHNCPPHYVCLRPYTKHVYTTPSTAGPGRKVTQSIPKVCNPEDL

SEQ ID NO: 32369 - protein, 1245 aa, Callosobruchus maculatus
MHRVTSKNNQRRPRVRRLNSPEPQTQTEQPIERNPAADVLPAQPATTKAGKPRQRLQWTTEINKSVMHCYYTATKLETISTGYRHELHRLFIAQYPHLAERVTEQRLIDQKRVITKNNRLTPEELQAIKILVSNEINTPHQNDPQTSNTTTSDNTTIPTEIDPEHEHTQDIPDNAVQPNDSLAIESITEGHTIHTRNNQPPNKDTINNTNIHFEIDPEHNHAPHTPETTCTNLPSTATQSQNITLPPAITQSAKQVMNTQYNKWCGTNPVLRDPLPRLIFKNNTRQILHTINANIIPQFLTNDSDLEDIHTVIYAAAATTLIVNGQKLPQRSKTHTSKRSKPKWQIRIENKISTLRKDLAHLTQYTNNNNLSKRIQTTINRLKSKSPQQTIPEIADTLKQKLAVYAARLRRYNESNDRKDANNLFQRSEKQFYQKMTSNNQITTTEPPSRQELTEFWGSLWSEPKTHNENAAWIRQEEEKHQHIAEQRDIVLTPEEIAETIKHTHNWKCPGVDNVQNFWYKQFSATYEMLTEQINKAILHPNRLPKFLTQGITYIKPKNADTRNPANYRPITCLPTLYKIITATIGKRIEQHLTQNNILTEEQKGCRKQSQGCKEQLIIDSVIMEQTRKEHRNLHTCFIDYKKAFDSVPHSWLKKTLQIYKINPVLRQFLTRTMETWRTNIHLKTQDGHIQTEELLIRRGIFQGDSLSSLWFCLCLNPLSNALNNTNYGFNIRHQKANHHRINHLLYMDDIKLYAATEVQLKELLRITEVCTSDVRMEFGMSKCKVLHINKGQWKNQAEQEILTGQTLDNMEKDETYKYLGFNQNIKIDHTQVKAQLTQEFRDRLVKLLKSKLNSKNLTKAINTFAIPVLTYSFGIIKWSHTDIENIHILIRTELTKHRMSHPNACKERLTIDRKQGGRGIIDIQSLRARQIKTLRQFFQSKQTNLHRAIAKADKSYTPLNLSCLDHAADTHNPIQSQQEKINTWSQKPLHGKHRYRITQDQINEKQSYTWLQDGQLFPETEGFMLAIQDQVIATRNYKKYVIKDPSVTNDNCRKCHQQKETIDHITSACKTLAGTEYTARHNSAAKIIHQALATKNKLIDNSDPYYKYTPTSVLENDHYKLYWDVEIHTDKTINANRPDIVFQTKADKVTYLIDIAIPNDVNVQNTYAGKISKYTDLAIEVKRLWKQDKVIIVPLIMSVSGLTPNTFTQHLQQLGLDEGLHKIFQKSVILKTCNIVRSFLNSDQ

SEQ ID NO: 32370 - protein, 1101 aa, Callosobruchus maculatus
MSLTSYPQRRQCSLLLLFYNNNNNNNNNNNTVPPNDSLADESTTERQNIHPRNSQTPNTDTTNDTSIHSDMDSEHEHIPDTPDQTSINLPLTATQSQKVTPPPSITQSTEQVMDTQYNKWCGTNPALRDPLPRLIFKKNTQQILHTINSNIIPQFLTNVSNLEDIHTVIYAAAATTLTVNGQKLPKRSKDHTSNRPKPKWQIRIENKISAIRKDLAHLAQYTNNNNRSKRIQTTIDMLKSKSPQKSIPEIADTLKQKLAVYAARLRRYNESNERKNANNLFQKSEKQFYQKISANNQEATIEPPSRQDLTEFWSSLWSEPKTHNQDAPWIRQEEEKHQHIMEQGDVILTPEEIAETIKHTHNWKCPGVDNIQNFWYKQFSSTYEVLTDQINKAILQPNRLPKFLTQGITYIKPKNTDTKNPANYRPITCLPTLYKIITATICRRIEQHLTQNNILTEEQKGCRKQSQGCKEQLIIDSVIMEQTRKEHRNLHTCFIDYKKAFDSVPHSWLKKTLQIYKINSGLRQFLTRIMETWRTNIHLKTQHGHIQTDELHIRRGIFQGDSLSSLWFCLCLNPLSNALNNTNCGFNIRHQKVNQHKINHLLYMDDIKLYAATEVQLRELLRITEVCTSDVRMEFGMSKCKVLHINKGQLKSHQERETLTGQTLDNMDKGETYKYLGFNQSVKIDHSQVKEQLIQEFRDRLIKLLKTKLNSRNLTKAINTFAIPVITYSFGIIKWSHTDIENIQILIRTELTRHRMSHPNACKERLTIDRKQGGRGIIDIQSLRTKQIKTLRHFFQSKQTNLHRAIVKADKNYTPLTLSSPNHAADTHNPIELQQEKINTWSQKALHGKHRYRITQDHINEKQSYTWLQDGQLFPETEGFMLAIQDQVIATRNYKKYIIKDPSVTNDNCRKCHQQKETIDHITSACKTLAGTEYTARHNSAAKIIHQALATTNNLIENTAPYYNYTPTSVLDNNQYKLYWDVEIHTDKTIPANRPDIVFQSKADKVTYLIDIAIPNDTNVQTAYAGKISKYTDLAIEVKRLWKQNKVVIVPLIMSVSGLTPNTFTPHLHQLGLDEKLHKIFQKSVILKTCNIVRSFLNSDQ

SEQ ID NO: 32371 - protein, 622 aa, Callosobruchus maculatus
MEQTRKEHRNLNTCFIDYKKAFDSVPHSWLTKTLQIYKINPTLRQFLTRIMETWRTNIHLKTQDGHIQTEELYIRRGIFQGDSLSSLWFCLCLNPLSNALNNTTYGFNIRHQKVNQHRINHLLYMDDIKLYAATEVQLKELLKITEVCTSDVRMEFGMSKCKVLHIHKGHWKNHSEQEILTGETLDNMEKDETYKYLGFNQNIKINHSKVKAQLTQELRDRLITLLKTKLNSKNLTKAINTFAIPVLTYSFGIIKWSHTDIENINILIRTELTKHRMSHPKACKERLTIDRKHGGRGIIDIQSLHTRQIKTLRDFFQSKETNLHRSIVKADKNYTPLTLSRPDHPADAHNHIELQQEKINTWSQKALHGKHRYRATQDHINESQSYTWLQDGQLFPETEGFMLAIQDQVIATRNYMKYIIKDTSITDDNCRKCHQQKETIDHTTSACKTLAGTEYTARHNSAAKVIHQALATTNKLIENTDPYYNYTPTSVLENNEYKLYWDVEIHTDKTIPASRPDIVFQSKADKVTYLIDIAIPNDTNIQNAYAGKISKYTDLAIEIKRLWKQNKVTIVPLIMSVSGLTPNTFTPHLQQLGLDERLHKIFQKSVILKTCNIVRSFLNSDP

SEQ ID NO: 32372 - protein, 1148 aa, Callosobruchus maculatus
MNKSVMRCYYTATKLETISTGYRHELHRLFTTQYPHLSTRVTEQRLIDQKRVITKNNRLTPQELQDIKNLVSNEMNIVQPNDSPTTEQIVETQNSDTQTSQTSNTAKTNNTSIHSELGPEHDQALDTPDTTITNLPSTIIQIQNITRPFAVTQSVEQVMSTQYNKWCGTNPALRDPLPRLIFKNNTQQILHTVNANVIPQFIRDDSNLEDIHTVIYAAAATTVIVNGQKLSKRSKHQTSNRTKPKWQIRIENKISTIRKDLAHLAQYTINNNHPSRHIQRTINILKSKSPQQTIPEITDTLKQKLAVYAARLRRYNESNARKDANSLFQKSEKQFYQKITADNQITTIEPPSKQELTEFWGSLWSEPKTHNEDAPWIREEEEKHQHIAEQGDVILSKEEIVETIKHTHDWKCPGVDNVQNFWYKHFSSTYEVLTNQINKAIRQPDRLPKFLTQGITYIKPKNADTKNPANYRPITCLPTLYKIITATLCRKIEQHLTQNNILTEEQKGCRKQSQGCKEQLIIDSVIMEQTRKEHRNLHTCFIDYKKAFDSVPHSWLTKILQIYKISPGLRQFLAKTMKTWRTNIHLTTQDGHIQTEELHIRRGIFQGDSLSSLWFCLCLNPLSNALNNTNYGFNIRHQKVNQHRINHLLYMDDIKLYAATDVQLRELLRITEVYTSDVRMEFGMNKCKVLHINKGQWKNHPEQEIVTGQTVDNMDKEETYKYLGFNQSVKIDHTQIKAELKQVFRDRLIKLLKTKLNSRNLTKAINTFAIPILTYSFGIIKWSHTDIENINILIRTELTKHRMSHPNACKERLTIDRTQGGRGITDIQSLRTRQIKTLRHFFQNKQTNLHRAIVKADKNYTPLNLSCPDHVADTHNPTQSQQEKISTWSQKPLHGKHRYRVTQDHINKKQSYTWLQDGQLFPETEGFMLAIQDQVIATRNYKKYIIKDPSITDDNCRKCQQQKETIDHITSGCKTLAGTEYTARHNSAAKVIHQALATTNKLIESTDPYYNYTPTSVLENDQYKLYWDVQIHTDKTIPANRPDIVFQSKLDKVTYLIDIAIPNDVNIQNTYAGKISKYTDLAMEIKRLWKQDKVTIVPLIMSVSGLTPNTFTPHLQQLGLDEKLHKTFQKSVILKTCNIVRSFLNSDQ

SEQ ID NO: 32373 - protein, 906 aa, Callosobruchus maculatus
MSKPKWQIRIENKISTIRTDLAHLAQYTNNNRSKRIQTTIDILESKSPQKSIPEIADTLKQKLAVYAARLRRYNESNERKNANNLFQKSEKQFYQKITANNQEATTDPPSRQELTEFWSSLWSEPKTHNQDAPWIRQEEEKHQHIMEQGDVILTPEEIAETIKHTHNWKCPGVDNIQNFWYKQFSSTYEVLTDQINKAILQPNRLPKFLTQGITYIKPKNADIKNPANYRPITCLPTLYKIITATICRRTEQHLTQNNILTEEQKGCRKQSQGCKEQLIIDSVIMEQARKEHRNLHTCFIDYKKAFDSVPHSWLKKTLQIYKINPGLRQFLTRTMETWRTNIHLKTQHGHIQTDELHIRRGIFQGDSLSSLWFCLCLNPLSNALNNSNCGFNIRHAKVNQHKINHLLYMDDIKLYAATEIQLRELLRITEVCTSDVRMEFGMSKCKVLHINKGQWKSHQEREIVTGQTLDNMDKDETYKYLGFNQSVKIDHSQVKEQLIQEFRDRLIKLLKTKLNSRNLTKAINTFAIPVLTYPFGIIKWSHTDIENIQILIRTELTKHRMSHPNACKERLTIDRKQGGRGIIDIQSLRTKQIKTLRHFFRSKQTNLHRAIVKADKNYTPLTLSNPDHTADTHNPIESQQEKINTWSQKALHGKHRYRITQDHINEKQSYTWLQDGQLFPETEGFMLAIQDQVIATRNYKKYIIKDPSVTNDNCRKCQQQKETIDHITSACKTLAGTEYTARHNSAAKIIHQALATTNKLIENTDPYYNYTPTSVLDNNQYKLYWDVEIHTEKTITANRPDIVFQSKADKVTYLIDIAIPNDTNIQTTYAGKISKYTDLAIEVKRLWKQNKVVIVPLIMSVSGLTPNTFTPHLHQLGLDEKLHKIFQKSVILKTCSIVRSFLNSDQ

SEQ ID NO: 32374 - protein, 1245 aa, Callosobruchus maculatus
MHRVTSKNNQRRPRVRRLNSPKPQTQTEQPIERNPAADVLPAQPATTKAGKPRQRLQWTTEINKSVMHCYYTATRLETISTGYRHELHRLFIAQYPHLAERVTEQRLIDQKRVITKNNRLTPEELQAIKMLVSNEVNTARQNDLQTSNTTRSDNTTIPTEIDPEHEHTQNRPDTAVQPNDSLAIESITEGHTIHSRNNQPPNKDTTNNTSIHLEIDPEHDHAPHTPETTCSNLPSTATQSQNITLPPAITQSAKQVMNTQYNKWCGTNPVLRDPLPRLIFKNNTREILYTINANIIPQFLTNDSDLEDIHTVIYAAAATTLIVNGQKLPKRSKNHTSKRSKPKWQIRIENKISTLRKDLAHVTQYTNNNNLSKRIQTTINRLKSKSPQQTIPQIADTLKQKLAVYAARLRRYNESNDRKDANNLFQKSEKQFYQKMTSNNQITTTEPPSRQELTEFWRSLWSEPKTHNENAPWIRQEEEKHQHIAEQGDVVFTPEEIAETIKRTHNWKCPGVDNVQNFWYKQFSATYEMLTEQINKAILQPNRLPKFLTQGITYIKPKNGDTRNPANYRPITCLPTLYKIITATIGKRIEQHLTQNNILTEEQKGCRKQSQGCKEQLIIDSVIMEQTRKEHRNLHTCFIDYKKAFDSVPHSWLTKTLQIYKINPVLRQFLTRTMETWRTNIHLKTQDGHIQTEELLIRRGIFQGDSLSSLWFCLCLNPLSNALNNTNYGFNIRHQKVNQHRINHLLYMDDIKLYAATEVQLKELLRITEVCTSDVRMEFGMSKCKVLHINKGQWKNQSEQEILTGETLDNMDKDETYKYLGFNQNIKIDHTQVKAQLTQEFRNRLLKLLKSKLNSKNLTKAINTFAIPVLTYSFGIIKWSHTDIENIHILIRTELTKHRMSHQNACKERLTIDRKQGGRGIIDIQSLHTRQIKTLRDFFQSKQTNLHRSIVKADKNYTPLNLSRTDHSADGHNHIELQQEKINTWSQKALHGKHRYRVTQEHINERQSYTWLQDGQLFPETEGFMLAIQDQVIATRNYMKYIIKDTSITDDNCRKCHQQKETIDHITSGCKTLAGTEYTARHNSAAKVIHQALATTSKLIENTDPYYNYTPTSVLENNEYKLYWDVEIHTDKTIPANRPDIVFQSKADKVTYLIDIAIPNDTNIQNAYAGKISKYTDLAIEIKRLWKQNKVTIVPLIMSVSGLTPNTFTPHLQQLGLDERLHKIFQKSVILKTCNIVRSFLNSDP

SEQ ID NO: 32375 - protein, 1085 aa, Callosobruchus maculatus
MDPKQEHTQDRPDTAVQPNDSLAIESVTEGHTIHTRNNQPPNKDTTNDTSIHLEIDPEHDHAPHTPETTCSNLPSTATQSQNITLPPAITQSAKQVMNTQYNKWCGTNPVLRDPLPRLIFKNNTRQILHTINANIIPQFLTNDSDLEDIHTVIYAAAATTLIVNGQKLPKRSKSHTSKRSKPKWQIRIENKISTLRKDLAHVTQYTNNNNLSKRIQTTINRLKSKSPQQTIPEIADTLKQKLAVYAARLRRYDESNDRKDANNLFQKSEKQFYQKMTSNNQITTTEPPSRQELTEFWGSLWSEPKTHNENAPWIRQEEEKHQHIAEQADVVFTPDEIAETIKHTHNWKCPGVDNVQNFWYKQFSATYKMLTEQINKAILQPNRLPKFLTQGITYIKPKNGDTRNPANYRPITCLPTLYKIITATIGKRIEQHLTQNNILTEEQKGCRKQSQGCKEQLIIDSVIMEQTRKEHRNLHTCFIDYKKAFDSVPHSWLTKTLQIYKINPVLRQFLTRTMETWRTNIHLKTQDGHIQTEELLIRRGIFQGDSLSSLWFCLCLNPLSNALNNTNYGFNIRHQKVNQHRINHLLYMDDIKLYAATEVQLKELLRITEVCTSDVRMEFGMSKCKVLHINKGQWKNQSEQEILTGETLDNMDKDETYKYLGFNQNIKIDHTQVKAQLTQEFRNRLLKLLKSKLNSTNLTKAINTFAIPVLTYSFGIIKWSHTDIENIHILIRTELTKHRMSHPNACKERLTIDRKQGGRGIIDIQSLRTRQIKTLRDFFQSKQTNLHRSIVKADKNYTPLNLSRSDHSADGHNHIELQQEKINTWSQKALHGKHRYRVTQDHINERQSYTWLQDGQLFPETEGFMLAIQDQVIATRNYMKYIIKDTSITDDNCRKCHQQKETIDHITSGCKTLAGTEYTARHNSAAKVIHQALATTNKLIENTDPYYNYTPTSVLENNEYKLYWDVEIHTDKTIPANRPDIVFQSKADKVTYLIDIAIPNDTNIQNTYAGKISKYTDLAIEIKRLWKQNKVTIVPLIMSVSGLTPNTFTPHLQQLGLDEKLHKIFQKSVILKTCNIVRSFLNSDP

SEQ ID NO: 32376 - protein, 1027 aa, Callosobruchus maculatus
MTNSRTPQFNKRCNTTTQNQNQNIARSPSITQTAEQVMNTQFNKWCGTNPALRDPLPRLIFKNNTQQILHTINTNLIPQFITNNSNLEDIHTVIYAAAATTLVVNGQKLQKRSKDQRSNRAKPKWQIRIENKISTLRKDLAHLAQYSNNNNHPSKHIQRTINILKSKSPQKSIPEIADTLKQKLAVYAARLRRYNESNDRKDANNLFQKSEKQFYQKITSNNQITTIEPPSRQELTAFWRSLWSEPKTHNENAPWIRQEETKHQHITEQGNVILTTEEIAETIKHTHNWKCPGVDNVQNFWYKQFSSTYEMLTDQINKAILQPNRLPKFLTQGITYIKPKNADTKNPANYRPITCLPTLYKIITATICRRIEQHLMQNNILTEEQKGCRKHSQGCKEQLIIDSVIMEQTRKEHRNLHTCFIDYKKAFDSVPHSWLMKTLQIYKINPGLRQFLKSTMETWRTNIHLQTHDGHIQTDELHIRRGIFQGDSLSSLWFCLCLNPLSNTLKSTNHGFNIRHHKADQHKINHLLYMDDIKLYAATEVQLRELLKITEVYTSDIRMEFGMSKCKVLHINKGQWKNQPEKEVVTGQPLNNMDKDETYKYLGFNQNVKIDHTQVKAQLTQEFKDRLIKLLKTKLNSKNLTKAINTFAIPVLTYSFGIIKWSHTDIENIHILIRTELTKHRMSHPNACKERLAIDRKLGGRGIIDIQSLRTTQIQTLRHFFQTKQTNLHKAIVKADKNYTPLNLSSPDHVADTYNHIQSQQEKINTWSQKALHGKHRYRVTQDHINQKQSYAWLQDGQLFPETKGFMLAIQDQVIATRNYKKYIIKDPSITDDNCRKCQQQKETIDHITSGCKTLAGTEYTARHNSAAKVIHQVLATTNKLIENTDPYYNYTPTSVLENDQYKLYWDVEIHTDKTIPANRPDIVFQSKADKITYLIDIAIPNDVNIQNTYAGKISKYTDLAMEIKRLWKQNKVTTVPLIMSVSGLTPSTFTQHLQQLGLDEKLHKVFQKSVILKTCNIVRSFLNSDQ

SEQ ID NO: 32377 - protein, 1027 aa, Callosobruchus maculatus
MTNSRTTQFNKRCNTTTQNQNQNIARSPSITQTAEQVMDTQFNKWCGTNPALRDPLPRLIFKNNTQQILHTINTNLIPQFITNNSNLEDIHTVIYAAAATTLIVNGQKLQKRSKDQRSNRAKPKWQIRIENKISTLRKDLAHLAQYSNNNNHPSKHIQRTINILKSKSPQKSIPEIADTLKQKLAVYAARLRRYNESNDRKDANNLFQKSEKQFYQKITSNNQITTIEPPSRQELTAFWRSLWSEPKTHNENAPWIRQEETKHQHITEQGNVILTTEEIAETIKHTHNWKCPGVDNVQNFWYKQFSSTYEMLTDQINKAILQPNRLPKFLTQGITYIKPKNADTKNPANYRPITCLPTLYKIITATICRRIEQHLMQNNILTEEQKGCRKHSQGCKEQLIIDSVIMEQTRKEHRNLHTCFIDYKKAFDSVPHSWLMKTLQIYKINPGLRQFLKSTMETWRTNIHLQTHDGHIQTDELHIRRGIFQGDSLSSLWFCLCLNPLSNTLNSTNHGFNIRHHKADQHKINHLLYMDDIKLYAATEVQLRELLKITEVYTSDIRMEFGMSKCKVLHINKGQWKNQPEKEVVTGQPLDNMDKDETYKYLGFNQNVKIDHTQVKAQLTQEFKDRLIKLLKTKLNSKNLTKAINTFAIPVLTYSFGIIKWSHTDIENIHILIRTELTKHRMSHPNACKERLAIDRKLGGRGIIDIQSLRTTQIQTLRHFFHTKQTNLHKAIVKADKNYTPLNLSSPDHVADTYNHIQSQQEKINTWSQKALHGKHRYRVTQDHINQKQSYAWLQDGQLFPETEGFMLAIQDQVIATRNYKKYIIKDPSITDDNCRKCQQQKETIDHITSGCKTLAGTEYTARHNSAAKVIHQALATTNKLIENTDPYYNYTPTSVLENDQYKLYWDVEIHTDKTIPANRPDIVFQSKADKITYLIDIAIPNDVNIQNTYAGKISKYTDLAMEIKRLWKQNKVTIVPLIMSVSGLTPSTFTQHLQQLGLDEKLHKVFQKSVILKTCNIVRSFLNSDQ

SEQ ID NO: 32378 - protein, 1207 aa, Callosobruchus maculatus
MDRVNFMNNQRRPRVRRLNSPEPQTEKEQPIGDNPFADVLPAEPATTKAGKPRQRLQWTTEMNTSVMHCYYTATKLETISTGYRHELHRLFTAQYPHLSARVTEQRLIDQKRVITKNNRLTPQQLQAIKNLVADEINTVETNDSLVNESITKTQHDHTLNDKTPNTNTTNTTSTQLEENPEHEFIPDAPDTVCTNRPPTTTRNQNVTQTPSFTQSAVQVMNAQFNKWCGTNPALRDPLPRLIFNSNTQKILHTINTNVIPQFLTGGSNLEDIHTVIYAAAAATLIVNGQKLPKRSNNHASKRSKPKWQMRIENKITTIRKELAHLAQYTNNNNRSKRIQTTIDILKSKSPQKSIPEITDTLKQKLAVYAARLRRYNESNERKDANNLFQKSEKQFYKKITTDNQITAIELPSKQELTEFWGSLWSEPKTHNENAPWIRQEEEKHQHIAEQGNVILTPEEIAETIKHTHNWKCPGVDNIQNFWYKQFSSVYEVLTDQINKAILQPNRLPKFLTQGITYIKPKNADTKNPANYRPITCLPTLYKIITATICRRIEKHLTENSILTEEQKGCRKQSQGCKEQLIIDSVIMEQTRKEHRNLHTCFIDYKKAFDSVPHSWLTKTLQIYKINPGLRQFLTRTMETWRTNIHLQTEDSHIQTDELHIRRGIFQGDSLSSLWFCLCLNPLSNTLNSTNCGFTIRHQKANQHKINHLLYMDDLKLYAATEVQLRELLRVAEVCTSDIKMEFGMSKCKVLHINKGQWKNHPEQEVVTGQALDNMDKDETYKYLGINQNAKIDHTKIKSQLTQEFKDRLIRLLKTKLNSRNLTKAINTFAIPILTYSFGIIKWSHTDIENIHILIRTELTKHRMSHPKACKERLTIDRKQGGRGIIDIQSLHAKQIKSLRHFFHSKQTNLHKAIVKADKNYTPLALSCPDHAADAHNHIQAQQEKINTWSQKALHGKHRYRVTQDHINEKQSYTWLQDGQLFPETEGFMLAIQDQVIATRNYRKYIMKDPSISDDNCRKCHQQKETIEHITSGCKTLAGTEYTARHNSAAKVIHQALATTNKLIENTDPYYNYTPTSVLENNQFKLYWDIEIHTDKTIPANRPDIVFQSKTDKVTYLIDIAIPNDMNIQNTYAGKISKYTDLAIEIKRLWKQNKVVIVPFIMSVSGLTPNTFTPHLQQLGLDEKLHKTFQKSVILKTCSIVRSFLNSE

SEQ ID NO: 32379 - protein, 1260 aa, Callosobruchus maculatus
MDKVNLINNPRRPRVRRLNSPESQTRTQQPIAHNPAADVLPAQPATTKAGKPRQRLQWTTEMNKFVMRCYYTATKLETISTGYRHELHRLFIAQYPHLAERVTEQRLIDQKRVITKNNRLTPQELQAVKKLVANEINTVHPIDSLVTESITETQNIHTRNNQTTNTATTNNISIQSEIDSEHEHTPNTPDITFTNLPATTTQSQQISQPPSVTQSAEAVNTAQPPSISGEPEQMTNSRTTQFNKRCNTTTQNQNQNIARSPSITQTAEQVMNTQFNKWCGTNPALRDPLPRLIFKNNTQQILHTINTNLIPQFITNNSNLEDIHTVIYAAAATTLIVNGQKLQKRSKDQRSNRAKPKWQIRIENKISTLRKDLAHLAQYSNNNNHPSKHIQRTINILKSKSPQKSIPEIADTLKQKLAVYAARLRRYNESNDRKDANNLFQKSEKQFYQKITSNNQITTIEPPSRQELTAFWRSLWSEPKTHNENAPWIRQEETKHQHITEQGNVILTTEEIAETIKHTHNWKCPGVDNVQNFWYKQFSSTYEMLTDQINKAILQPNRLPKFLTQGITYIKPKNADTKNPANYRPITCLPTLYKIITATICRRIEQHLMQNNILTEEQKGCRKHSQGCKEQLIIDSVIMEQTRKEHRNLHTCFIDYKKAFDSVPHSWLMKTLQIYKINPGLRQFLKSTMETWRTNIHLQTHDGHIQTDELHIRRGIFQGDSLSSLWFCLCLNPLSNTLNSTNHGFNIRHHKADQHKINHLLYMDDIKLYAATEVQLRELLKITEVYTSDIRMEFGMSKCKVLHINKGQWKNQPEKEVVTGQPLDNMDKDETYKYLGFNQNVKIDHTQVKAQLTQEFKDRLIKLLKTKLNSKNLTKAINTFAIPVLTYSFGIIKWSHTDIENIHILIRTELTKHRMSHPNACKERLAIDRKLGGRGIIDIQSLRTTQIQTLRHFFHTKQTNLHKAIVKADKNYTPLNLSSPDHVADTYNHIQSQQEKINTWSQKALHGKHRYRVTQDHINQKQSYAWLQDGQLFPETEGFMLAIQDQVIATRNYKKYIIKDPSITDDNCRKCQQQKETIDHITSGCKTLAGTEYTARHNSAAKVIHQALATTNKLIENTDPYYNYTPTSVLENDQYKLYWDVEIHTDKTIPANRPDIVFQSKADKITYLIDIAIPNDVNIQNTYAGKISKYTDLAMEIKRLWKQNKVTIVPLIMSVSGLTPSTFTQHLQQLGLDEKLHKVFQKSVILKTCNIVRSFLNSDQ

SEQ ID NO: 32380 - protein, 1208 aa, Callosobruchus maculatus
MDKVSFSNNQRRPRVRRLNSPEPQNQTAQPIAHNPTADVLPVQPATTKAGKPRQRLQWTTEMNKSVMHCYYTATKLETISTGYRHELHRLFTAQYPHLSTRVTEQRLIDQKRVITKNNRLTPQELQAIKSLVSNEINTVPPNDSLADESTTERQNIHPRNSQTPNTDTTNDTSIHSDMDSEHEHIPDTPDQTSINLPVTATQSQKVTPPPSITQSTEQVMDTQYNKWCGTNPALRDPLPRLIFKKNTQQILHTINSNIIPQFLTNVSNLEDIHTVIYAAAATTLTVNGQKLPKRSKDHTSNRPKPKWQIRIENKISAIRKDLAHLAQYTNNNNRSKRIQTTIDILKSKSPQKSIPEIADTLKQKLAVYAARLRRYNESNERKNANNLFQKSEKQFYQKISANNQEATTEPPSRQDLTEFWSSLWSEPKTHNQDAPWIRQEEEKHQHIMEQGDVILTPEEIAETIKHTHNWKCPGVDNIQNFWYKQFSSTYEVLTDQINKAILQPNRLPKFLTQGITYIKPKNTDTKNPANYRPITCLPTLYKIITATICRRIEQHLTQNNILTEEQKGCRKQSQGCKEQLIIDSVIMEQTRKEHRNLHTCFIDYKKAFDSVPHSWLKKTLQIYKINSGLRQFLTRIMETWRTNIHLKTQHGHIQTDELHIRRGIFQGDSLSSLWFCLCLNPLSNALNNTNCGFNIRHEKVNQHKINHLLYMDDIKLYAATEVQLRELLRITEVCTSDVRMEFGMSKCKVLHINKGQWKTNQERETLTGQTLDNMDKGETYKYLGFNQSVKIDHSQVKEQLIQEFRDRLIKLLKTKLNSRNLTKAINTFAIPVITYSFGIIKWSHTDIENIQILIRTELTRHRMSHPNACKERLTIDRKQGGRGIIDIQSLRTKQIKTLRHFFQSKQTNLHRAIVKADKNYTPLTLSSPNHAADTHNPIELQQEKINTWSQKALHGKHRYRITQDHINEKQSYTWLQDGQLFPETEGFMLAIQDQVIATRNYKKYIIKDPSVTNDNCRKCHQQKETIDHITSACKTLAGTEYTARHNSAAKIIHQALATTNNLIENTAPYYNYTPTSVLDNNQYKLYWDVEIHTDKTIPANRPDIVFQSKADKATYLIDIAIPNDTNVQTAYAGKISKYTDLAIEVKRLWKQNKVVIVPLIMSVSGLTPNTFTPYLHQLGLDEKLHKIFQKSVILKTCNIVRSFLNSDH

SEQ ID NO: 32381 - protein, 1207 aa, Callosobruchus maculatus
MDRVNFINNQRRPRVRRLNSPEPQTEKEEPIGDNPVADVLPVEPATTKAGKPRQRLQWTTEMNTSVMHCYYTATKLETISTGYRHELHRLFTAQYPHLSARVTEQRLIDQKRVITKNNRLTPQQLQAIKNLVADEINTVETNDSLVNESITETQHDHTLNDKTPNTNTTNTTSTHLEENPEHEFIPDAPDTVCTNRPPTTTRNQNVTQTPSFTQSAEQVMNAQFNKWCGTNPALRDPLPRLIFNSNTQKILHTINTNVIPQFLTSGSNLEDIHTVIYAAAAATLIVNGQNLPKRSNNHTSKRSKPKWQMRIENKITTIRKELAHLAQYTNNNNRSKRIQTTIDILKSKSPQKSIPEITDTLKQKLAVYAARLRRYNESNDRKDANNLFQKSEKQFYKKITTDNQITATELPSKQELTEFWGSLWSEPKTHNENAPWIRQEEEKHQHIAEQGNVILTPEEIAETIKHTHNWKCPGVDNIQNFWYKQFSSVYEVLTDQINKAILQPNRLPKFLTQGITYIKPKNADTKNPANYRPITCLPTLYKIITATICRRIEKHLTENSILTEEQKGCRKQSQGCKEQLIIDSVIMEQTRKEHRNLHTCFIDYKKAFDSVPHSWLTKTLQIYKINPGLRQFLTRTMETWRTNIHLQTEDGHIQTDELHIRRGIFQGDSLSSLWFCLCLNPLSNTLNSTNCGFTIRHQKANQHKINHLLYMDDLKLYAATEVQLRELLMITEVCTSDIKMEFGMSKCKVLHINKGQWKNHPEQEVVTGQALDNMDKDETYKYLGINQNAKIDHTKIKSQLTQEFKDRLIRLLKTKLNSRNLTKAINTFAIPILTYSFGIIKWSHTDIENIHILIRTELTKHRMSHPKACKERLTIDRKQGGRGIIDIQSLHAKQIKSLRHFFHSKQTNLHKAIVKADKNYTPLALSCPDHAADAHNHIQAQQEKINTWSQKALHGKHRYRVTQDHINEKQSYTWLQDGQLFPETEGFMLAIQDQVIATRNYKKYIMKDPSISDDNCRKCHQQKETIEHITSGCKTLSGTEYTARHNSAAKVIHQALATTNKLIENADPYYNYTPTSVLENNQFKLYWDIEIHTDKTIPANRPDIVFQSKTDKVTYLIDIAIPNDMNIQNTYAGKISKYTDLAIEIKRLWKQNKVVIVPLIMSVSGLTPNTFTPHLQQLGLDEKLHKTFQKSVILKTCSIVRSFLNSE

SEQ ID NO: 32382 - protein, 1186 aa, Callosobruchus maculatus
MDRVNFINNQRRPRVRRLNSPEPQTEKEQPIGDNPVADVLPVEPATTKAGKPRQRLQWTTEMNTSVMHCYYTATKLETISTGYRHELHRLFTAQYPHLSARVTEQRLIDQKRVITKNNRLTPQQLQAIKNLVADEINTVEMNDSLVNESITETQHDHTLNDKTPNTNTTNTTSTHLEENPEHEFIPDAPDTVCTNRPLTTTRNQNVTQTPSLTQSAEQVMNAQFNKWCGTNPTLRDPLPRLIFNSNTQKILHTINTNVIPQFLTSGSNLEDIHTVIYAAAAATLIVNGQKLPKRSNNHTSKRSKPKWQMRIENKISTIRKELAHLAQYTNNNNRSKRIQTTIDILKSKSPQKSIPEITDTLKQKLAVYAARLRRYNESNDRKDANNLFQKSEKQFYKKITTDNQITAIELPSKQELTEFWGSLWSEPKTHNVNAPWIRQEEEKHQQIAEQGDVILTPEEIAETIKHTHNWKCPGVDNIQNFWYKQFSSVYEVLTDQINKAILQPNRLPKFLTQGITYIKPKNADTKNPANYRPITCLPTLYKIITATICRRIEKHLTENNILTEEQKGCRKQSQGCKEQLIIDSVIMEQTRKEHRNLHTCFIDYKKAFDSVPHSWLTKTLQIYKINPGLRQFLTRTMETWRTNIHLQTEDGHTQTDELHIRRGIFQGDSLSSLWFCLCLNPLSNTLNSTNCGFTIRHQKANQHKINHLLYMDDLKLYAATEVQLRELLRITEVCTSDIKMEFGMSKCKVLHINKGQWKNHPEQEILTGQALDNMDKDELYKYLGINQNAKIDHTKIKSQLTQEFKDRLIRLLKTKLNSKNLTKAINTFAIPILTYSFGIIKWSHTDIENIHILIRTELTKHRMSHPKACKERLTIDRKQGGRGIIDIQSLHAKQIKSLRHFFHSKQTNLHKAIVKADKNYTPLALSCPDHAADAHNHIQAQQEKINTWSQKALHGKHRYRVTQDHINEKQSYTWLQDGQLFPETEGFMLAIQDQVIATRNYRKYVMKDPSISDDNCRKCHQQKETIEHITSGCKTLAGTEYTARHNSAAKVIHQALATTNKLIENTDPYYNYTPTSVLENNQFKLYWDIEIHTDKTIPANRPDIVFQSKTDKVTYLIDIAIPNDMNIQNTYAGKISKYTDLAIEIKRLWKQNKVLCRSQALLQIHLRHTCNNWAWMKSYIKPSKSL

SEQ ID NO: 32383 - protein, 1207 aa, Callosobruchus maculatus
MDRVNFINNQRRPRVRRLNSPEPQTEKEQPIGDNPVADVLPVEPATTKAGKPRQRLQWTTEINTSVMHCYYTATKLETISTGYRHELHRLFTAQYPHLSARVTEQRLIDQKRVITKNNRLTPQQLQAIKNLVADEINTVETTDSLVNESITETQDDHTLNYKTPNTNTTNTTSTHLEENPEHEFIPDAPDTVCTNRPPTTTRNQNVTQTPSFTQYAEQVMNAQFNKWCGTNPALRDPLPRLIFNSNTQKILHTINTNVIPQFLTGGSNLEDIHTVIYAAAAATLIVNGQKLPKRSNNHASKRSKPKWQMRIENKITTIRKELAHLAQYTNNNNRSKRIQTTIDILKSKSPQKSIPEITDTLKQKLAVYAARLRRYNESNERKDANNLFQKSEKQFYKKITTDNQITAIELPSKQELTEFWGSLWSEPKTHNENAPWIRQEEEKHQHIAEQGNVILTPEEIAETIKHTHNWKCPGVDNIQNFWYKQFSSVYEVLTDQINKAILQPNRLPKFLTQGITYIKPKSADTKNPANYRPITCLPTLYKIITATICRRIEKHLTENSILTEEQKGCRKQSQGCKEQLIIDSVIMEQTRKEHRNLHTCFIDYKKAFDSVPHSWLTKTLQIYKINPGLRQFLTRTMETWRTNIHLQTEDGHIQTDELHIRRGIFQGDSLSSLWFCLCLNPLSNTLNSTNCGFTIRHQKANQHKINHLLYMDDLKLYAATEVQLRELLRITEVCTSDIKMEFGMSKCKVLHINKGQWKNHPEQEVVTGQALDNMDKDETYKYLGINQNAKIDHTKIKSQLTQEFKDRLIRLLKTKLNSRNLTKAINTFAIPILTYSFGIIKWSHTDIENINILIRTELTKHRMSHPKACKERLTIDRKQGGRGIIDIQSLHAKQIKSLRHFFHSKQTNLHKAIVKADKNYTPLALSCPDHAADAHNHIQAQQEKINTWSQKALHGKHRYRVTQDHINEKQSYTWLQDGQLFPETEGFMLAIQDQVIATRNYRKYIMKDPSISDDNCRKCHQQKETIEHITSGCKTLAGTEYTARHNSAAKVIHQALATTNKLIENTDPYYNYTPTSVLENNQFKLYWDIEIHTDKTIPANRPDIVFQSKTDKVTYLIDIAIPNDMNIQNTYAGKISKYTDLAIEIKRLWKQNKVVIVPLIMSVSGLTPNTFTPHLQQLGLDEKLHKTFQKSVILKTCSIVRSFLNSE

SEQ ID NO: 32384 - protein, 970 aa, Callosobruchus maculatus
MTTPLLQHYFYSVYFNSIRFQSINNNNNNIIIEDIHTVIYAAAAATLIVNGQKLPKRSNNHTSKRSKPKWQMRIENKITTIRKELAHLAQYTNNNNRSKRIQTTIDILKSKSPQKSIPEITDTLKQKLAVYAARLRRYNESNDRKDANNLFQKSEKQFYKKITTDNQITAIELPSKQELTEFWGSLWSEPKTHNENAPWIRQEEEKHQHIAEQGDVILTPEEIAETIKHTHNWKCPGVDNIQNFWYKQFSSVYEVLTDQINKAILQPNRLPKFLTQGITYIKPKNADTKNPANYRPITCLPTLYKIITATICRRIEKHLTENSILTEEQKGCRKQSQGCKEQLIIDSVIMEQTRKEHRNLHTCFIDYKKAFDSVPQSWLTKTLQIYKINPGLRQFLTRTMETWRTNIHLQTEDGHIQTDELHIRRGIFQGDSLSSLWFCLCLNPLSNTLNSTNCGFTIRHQKANQHKINHLLYMDDLKLYAATEVQLRELLRITEVCTSDIKMEFGMSKCKVLHINKGQWKNHPEQEVVTGQALDNMDKDETYKYLGINQNAKIDHTKIKSQLTQEFKDRLIRLLKTKLNSRNLTKAINTFAIPILTYSFGIIKWSHTDIENIHILIRTELTKHRMSHPKACKERLTIDRKQGGRGIIDIQSLHAKQIKSLRHFFHSKQTNLHKAIVNADKNYTPLALSCPDHAADAHNHIKAQQEKINTWSQKALHGKHRYRVTQDHINEKQSYTWLQDGQLFPETEGFMLAIQDQVIATRNYRKYIMKDPSISDDNCRKCHQQKETIEHITSGCKTLAGTEYTARHNSAAKVIHQALATTNKLIENTDPYYNYTPTSVLENNQFKLYWDIEIHTDKTIPANRPDIVFQSKTDKVTYLIDIAIPNDMNIQNTYAGKISKYTDLAIEIKRLWKQNKVVIVPLIMSVSGLTPNTFTPHLQQLGLDEKLHKTFQKSVILKTCSIVRSFLNSE

SEQ ID NO: 32385 - protein, 1244 aa, Callosobruchus maculatus
MDKVTFAKNQRRPRVRRLNSPEPQIQTPEQPIALNPASDVLPVQPATTKAGKPRQRLQWTTEMNKSVMHCYYTATKLETISTGYRHEFHRLFTAQYPHLSTRVTEQRLIDQKRVITKNNRLTPLELQAIKNLVANETNTVQPNDSLASESITETQLIQTRNNQSPNTDTTNKTRKKSPVSNEIKMVESITETQNTLSRNNQTPDATNKTNIHFEINPEHEHTPDTPNTQFTNSPSTITQNRNINRPPSITQSAEEVMNIQFNKWCGTNPTLRDPLPRLIFKNNTQQILNTINSNIISQFLTSVSNLEDIHTVIYAAAATTLIVNGQKLPKRSKDHTSKMSKPKWQIRIENKISTIRKDLAHLAQYTNNNRSKRIQTTIDILESKSPQKSIPEIADTLKQKLAVYAARLRRYNESNERKNANNLFQKSEKQFYQKITANNQEATTDPPSRQELTEFWSSLWSEPKTHNQDAPWIRQEEEKHQHIMEQGDVILTPEEIAETIKHTHNWKCPGVDNIQNFWYKQFSSTYEVLTDQINKAILQPNRLPKFLTQGITYIKPKNADMKNPANYRPITCLPTLYKIITATICRRIEQHLTQNNILTEEQKGCRKQSQGCKEQLIIDSVIMEQARKEHRNLHTCFIDYKKAFDSVPHSWLKKTLQIYKINPGLRQFLTRTMETWRTNIHLKTQHGHIQTDELQIRRGIFQGDSLSSLWFCLCLNPLSNALNNSNCGFNIRHAKVNQHKINHLLYMDDIKLYAATEIQLRELLRITEVCTSDVRMEFGMSKCKVLHINKGQWKSHQEREIVTGQTLDNMDKDETYKYLGFNQSVKIDHSQVKEQLIQEFRDRLIKLLKTKLNSRNLTKAINTFAIPVLTYSFGIIKWSHTDIENIQILIRTELTKHRMSHPNACKERLTIDRKQGGRGIIDIQSLRTKQIKTLRHFFRSKQTNLHRAIVKADKNYTPLTLSNPDHTADTHNPIKSQQEKINTWSQKALHGKHRYRITQDHINEKQSYTWLQDGQLFPETEGFMLAIQDQVIATRNYKKYIIKDPSVTNDNCRKCQQQKETIDHITSACKTLAGTEYTARHNSAAKIIHQALATTNKLIENTDPYYNYTPTSVLDNNQYKLYWDVEIHTDKTITANRPDIVFQSKADKVTYLIDIAIPNDTNIQTTYAGKISKYTDLAIEVKRLWKQNKVVIVPLIMSVSGLTPNTFTPHLHQLGLDEKLHKIFQKSVILKTCSIVRSFLNSDQ

SEQ ID NO: 32386 - protein, 1126 aa, Callosobruchus maculatus
MREKLEKNIIIIMFICIIITRQRKNLAVANKQNGTANRLTPQQLQAIKSLVADEINTVETNDSLVNESIMETQHDHTLNDKTPNTNTTNTTSTHLEENPEHEFIPDAPDTVCTNRPPTTTRNQNVTQTSSFTQSAEQVMNAQFNKWCGTNPALRDPLPRLIFNSNTQKILHTINTNVIPQFLTKDSNLEDIHTVIYAAAAATLIVNGQKLPKRSNNHRSKKPKPKWQMRIENKITTIRKELAHLAQYTNNNNRSKRIQTTIDILKSKSPQKLIPEITDTLKQKLAVYAARLRRYNESNDRKDANNLFQKSEKQFYKKITTDNQITAIELPNKQELTEFWRSLWSEPKTHNENAPWIRQEEEKHQHIAEQGDVILTPEEIAETIKHTHNWKCPGVDNIQNFWYKQFSSVYEVLTDQINKAILQPNRLPKFLTQGITYIKPKNADTKNPANYRPITCLPTLYKIITATICRRIEKHLTENSILTEEQKGCRKQSQGCKEQLIIDSVIMEQTRKEHRNLHTCFIDYKKAFDSVPHSWLTKTLQIYKINPGLRQFLTRTMETWRTNIHLQTEDGHIQTDQLHIRRGIFQGDSLSSLWFCLCLNPLSNTLNSTNCGFTIRHQKANQHKINHLLYMDDLKLYAATEVQLRELLRITEVCTSDIKMEFGMSKCKVLHINKGQWKNHPEQEVVTGQALDNMDKDETYKYLGINQNAKIDHTKIKTQLTQEFKDRLIRLLKTKLNSRNLTKAINTFAIPILTYSFGIIKWSHTDIENIYILIRTELTKHRMSHPKACKERLTIDRKQGGRGIIDIQSLHAKQIKSLRHFFHSKQTNLHKAIVKADKNYTPLTLSCPDHAADAHNHIKAQQEKMNTWSQKALHGKHRYRVTQDHINEKQSYTWLQDGQLFPETEGFMLAIQDQVIATRNYRKYIMKDPSISDDNCRKCHQQKETIEHITSGCKTLAGTEYTARHNSAAKVIHQALATTNKLIENTDPYYSYTPTSVLENNQFKLYWDIEIHTDKTIPANRPDIVFQSKTDKVTYLIDIAIPNDMNIQNTYAGKISKYTDLAIEIKRLWKQNKVVIVPLIMSVSGLTPNTFTPHLQQLGLDEKLHKTFQKSVILKTCSIVRSFLNSE

SEQ ID NO: 32387 - protein, 1242 aa, Callosobruchus maculatus
MHKVTSKNNQRRPRVRRLNSPEPQTQTEQPRQHNPAADVLPAQPATTKAGKPRQRLQWTTEINKHVMHCYYTATQLETISTGYRHELHRLFIAQYPHLAERVTEQRLIDQKRVITKNNRLTPEELQAIKILVSNEINTAHPNHPQTSNRTTIDNTSIHSETDPEHEHTQHIPDSAVQPNDSLATESITERHAIRTRNNQPPNIGTTNTTSIHLELDLENDHTPETTCTNLPSTATQNQNITLPPAITQSAEQVMNTQYNKWCGTNPTLRDPLPRLIFKNNTLQILHTIDVNIIPQFLTKDSDLEDIHTVIYAAAATALTLNGQKLPKRSIARTTERSKPKWQIRIENKISTIRKDLAHLAQYTNNNNRSKRVQTTINMLKSKSPQQTIPEIADTLKQKLAVYAARLRRYNESNARKDANNLFQKSEKQFYQKITADNQITAIEPPSKQELTEFWGSLWSEPKTHNENAPWIRQEEEKHQHIVEQEDVILTPEEIAETIKHTHNWKCPGVDNVQNFWYKQFSATYEMLTDQINKAILQPNRLPKFLTQGITYIKPKNADTKNPANYRPITCLPTLYKIITATICRRIEQHLTQNNILTEEQKGCRKQSQGCKEQLIIDSVIMEQTRKEHRNLHTCFIDYKKAFDSVPHSWLARTLQIYKINPGLREFLASTMETWRTSIHLKTQDGLIKTDELHIRRGIFQGDSLSSLWFCLCLNPLSNALNNTNCGFNIRHDRLNQHKINHLLYMDDIKLYAANEVQLKELIRTTEACSSDVRMEFGMSKCKVLHINKGQWKDHPQQETVAGQTLNNMNKDETYKYLGFNQNVKIDHTQVKAQLTQEFRDRLIKLLKTKLNSRNLTKAINTFAIPVLTYSFGIIKWSHTDIENIHILIRTELTKHRMSHPNACKERLTIDRKQGGRGITDIQSLRTRQIKTLRHFFQNKQTNLHRAIVKADKNYTPLNLSCPDHVADTHNPTQSQQEKISTWSQKPLHGKHRYRITQDHINEKQSYTWLKDGQLFPETEGFMLAIQDQVIATRNYKKYVIKDPSITNDNCRKCQQQKETIDHITSACKTLAGTEYTARHNSAAKIIHQALATKNKLIENSDPYYKYTPTSVLENDHYKLYWDVEIHTDKTINANRPDIVFQIKADKVTYLIDIAIPNDVNVQNTYAGKISKYTDLAIEVKRIWKQDKVIIVPFIMSVSGLTPNTFTQHLQQLDLDESLHKIFQKSVILKTCNIVRSFLNSDQ

SEQ ID NO: 32388 - protein, 1114 aa, Callosobruchus maculatus
MDRVNFMNNQRRPRVRRLNSPEPQTQTEQPIEHNPAADVLPTQPVTTKAGKPRQRLQWTTEMNKSVMRCYYTATKLETISTGYRHELHRLFTTQYPHLSTRVTEQRLIDQKRVITKNNRLTPQELQDIKNLVSNEMNIVQPNDSLTTEQIVETQNSDTQNSDTQTSQTSNIAKTNNTSIHSELGPEHDQALDTPDTTTTNLPSTIIQIQNITRPFAVTQSVEQVMRTQYNKWCGTNPALRDPLPRLIFKNDTQQILHTVNANVIPQFIRNDSNLEDIHTVIYAAAATTLIVNGQKLSKRSKHQTSNRTKPKWQIRIENKISTIRKDLAHLAQYTINNNHPSRHIQRTINILKSKSPQQTIPEITDTLKQKLAVYAARLRRYNESNARKDANSLFQKSEKQFYQKITADNQITTIEPPSKQELTEFWGSLWSEPKTHNEDAPWIREEEEKHQHIAEQGDVVLSKEEIVETIKHTHDWKCPGVDNVQNFWYKHFSSTYQVLTNQINKAIRQPDRLPKFLTQGITYIKPKNADTKNPANYRPITCLPTLYKIITATLCRRIEQHLTQNNILTEEQKGCRKQSQGCKEQLIIDSVIMEQTRKEHRNLHTCFIDYKKASDSVPHSWLTKILQIYKINPGLRQFLAKTMKTWRTNIHLTTQDGHIQTEELHIRRGIFQGDSLSSLWFCLCLNPLSNALNNTNYGFNIRHQKVNQHRINHLLYMDDIKLYAATDVQLRELLRITEVYTSDVRMEFGMNKCKVLHINKGQWKNHPEQEIVTGQTLDNMDKEETYKYLGFNQSVKIDHTQIKAELRQVFRDRLIKLLKTKLNSRNLTKAINTFAIPILTYSFGIIKWSHTDIENIQILIRTELTKQRMSHPNACKERLTIDRTQGGRGITDIQSLRTRQIKTLRHFFQNKQTNLHRAIVKADKNYTPLNLSCPDHVADTHNPTQSQQEKISTWSQKPLHGKHRYRVTQDHINKKQSYTWLQDGQLFPETEGFMLAIQDQVIATRNYKKYIIKDPSITDDNCRKCQQQKETIDHITSGCKTLAGTEYTARHNSAAKVIHQALATTNKLIENTDPYYNYTPTSVLENDQYKLYWDVQIHTDKTIPANRPDIVFQS

SEQ ID NO: 32389 - protein, 1242 aa, Callosobruchus maculatus
MHKVTSKNNQRRPRVRRLNSPEPQTQTEQPRQHNPAADVLPAQPATTKAGKPRQRLQWTTEINKHVMHCYYTATQLETISTGYRHKLHRLFIAQYPHLAERVTEQRLIDQKRVITKNNRLTPEELQAIKILVSNEINTAHPNHPQTSNRTTIDNTSIHSETDPEHEHTQHIPDSAVQPNDSLATESITERHAIRTRNNQPPNTGTTNTTSIHLELDLENDHTPETTCTNLPSTATQSQNITLPPAITQSAEQVMNTQYNKWCGTNPTLRDPLPRLIFKNNTLQILHTINVNIIPQFLTKDSDLEDIHTVIYAAAATALTLNGQKLPKRSIARTTERSKPKWQIRIENKISTIRKDLAHLAQYTNNNNRSKRVQTTINILKSKSPQQTIPEIADTLKQKLAVYAARLRRYNESNARKDANNLFQKSEKQFYQKITADNQITAIEPPSKQELTEFWGSLWSEPKTHNENAPWIGQEEEKHQHIVEQEDVILTPEEIAETIKHTHNWKCPGVDNVQNFWYKQFSATYEMLTDRINKAILQPNRLPKFLTQGITYIKPKNADTKNPANYRPITCLPTLYKIITATICRRIEQHLTQNNILTEEQKGCRKQTQGCKEQLIIDSVIMEQTRKEHRNLHTCFIDYKKAFDSVPHSWLAKTLQIYKINPGLREFLTSTMESWRTSIHLKTQDGPIKTDELHIRRGIFQGDSLSSLWFCLCLNPLSNALNNTNCGFNIRHDRLNQHKINHLLYMDDIKLYAANEVQLKELIRTTEACSSDVRMEFGMSKCKVLHINKGQWKDHPQQETVAGQTLNNMNKDETYKYLGFNQNVKIDHTQVKAQLTQEFRDRLIKLLKTKLNSRNLTKAINTFAIPVLTYSFGIIKWSHTDIENIHILIRTELTKHRMSHPNACKERLTIDRKQGGRGIVDIQSLRTRQIKTLRHFFQNKQTNLHRAIVKADRNYTPLNLSCPDHVADTHNPTQSQQEKISTWSQKPLHGKHRYRITQDHINEKQSYTWLQDGQLFPETEGFMLAIQDQVIATRNYKKYVIKDPSITNDNCRKCQQQKETIDHITSACKTLAGTEYTARHNSAAKIIHQALATKNKLIENSDPYYKYTPTSVLENDHYKLYWDVEIHTDKTINANRPDIVFQIKADKVTYLIDIAIPNDVNVQNTYAGKISKYTDLAIEVKRVWKQDKVIIVPFIMSVSGLTPNTFTQHLQQLGLDESLHKIFQKSVILKTCNIVRSFLNSDQ

SEQ ID NO: 32390 - protein, 989 aa, Callosobruchus maculatus
MNIQFNKWCGTNPTLRDPLPRLIFKNNTQQILHSINANVIPQFITNDSTLEDIHTVIYAAAATTLILNGQKLPKRSTDHTSERSKPKWQIRIENKISAIRKDLAHLAQYTNNNNPSKRIQRTVNILKSKSPQPTVPEIADTLKQKLAVYAARLRRYNESNARKDANNLFQKSEKQFYQKITSNNQITTIEPPSKQELTEFWGSLWSEPKTHNEDAPWIKQEEQKHQHIEEQGDIILTPEEIAETIKHTHNWKCPGVDSIQNFWYKQFSATYEMLANQINKAIIQPERFPKFLTQGITYIKPKNADTKNPANYRPITCLPTLYKIVTSTICRRIEQHLTQNSILTEEQKGCRKQSQGCKEQLIIDSVIMEQTRKEHRSLHTCFIDYKKAFDSVPHSWLTKILQIYKINPGIRRFLTRTMETWRTNIHLKTQDGHIQTEELNIRRGIFQGDSLSSLWFCLCLNPLSNALNSTNYGFNIRHQKANQHRINHLLYMDDIKLYAATDVQLRELLRITEVCTSDVRMEFGMSKCKVLHINKGQWKNHPQQEIVTGQTLDNMDKEETYKYLGFNQSVKIDHTQTKAQLRQVFRDRLVKLLKTKLNSRNLTKAINTFAIPILTYSFGIIKWSHTDIENIHILIRTELTKHRMSHPNTCKERLTIDRKQGGRGIIDIQSLHSRQIKTLRHFFQSKQTNLHRSIVKADKNYTPLNLSCPDHAADTYNHIQSQQEKINTWSQKALHGKHRYRVTQDHINERQSYTWLHDGQLFPETEGFMLAIQDQVIATQNYKKYIIKDPSITDDNCRKCHQQKETIDHITSGCKTLAGTEYTARHNSAAKVIHQALATTNKLIENTDPYYNYTPTSVLENNQYKLYWDVEIHTDKTIPANRPDIVFQSKLDKVTYLIDIAIPNDVNIQNTYAGKISKYTDLAMEIKRLWKQDKVTIVPFIMSVSGLTPNTFTPHLQQLGLDERLHKTFQKSVILKTCNIVRSFLNSDQ

SEQ ID NO: 32391 - protein, 1260 aa, Callosobruchus maculatus
MDKVNLINNPRRPRVRRLNSPECQTRTKQPIAHNPAADVLPAQPATTKAGKPRQRLQWTTEMNKFVMRCYYTATKLETISTGYRHELHRLFIAQYPHLAERVTEQRLIDQKRVITKNNRLTPQELQAVKKLVANEINTAHPNDLLVTESITETQNIHTRNNQTTNTATTNNISIQSEIDSEHEHTPNTPDITFTNLPATTTQSQQISQPPSVTQSAEAVNTAQPPSISGEPEQMTNSRTTQFNKRCNTTTQSQNQNIARSPSITQTAEQVMNTQFNKWCGTNPALRDPLPRLIFKNNTQQILHTINTNLIPQFITNNSNLEDIHTVIYAAAATTLIVNGQKLQKRSKDQRSNRAKPKWQIRIENKISTLRKDLAHLAQYSNNNNHPSKHIQITINIMKSKSPQKSIPEIADTLKQKLAVYAARLRRYNESNDRKDANNLFQKSEKQFYQKITSNNQITTIEPPSRQELTAFWRSLWSEPKTHNENAPWIRQEETKHQHITEQGNVILTTEEIAETIKHTHNWKCPGVDNVQNFWYKQFSSTHEMLTYQINKAILQPNRLPKFLTQGITYIKPKNADTKNPANYRPITCLPTLYKIITATICRRIEQHLMQNNILTEEQKGCRKHSQGCKEQLIIDSVIMEQTRKEHRNLHTCFIDYKKAFDSVPHSWLMKTLQIYKINPGLRQFLKSTMETWRTNIHLQTHDGHIQTDELHIRRGIFQGDSLSSLWFCLCLNPLSNTLNSTNHGFSIRHHTADQHKINHLLYMDDIKLYATTEVQLRELLKITEVYTSDIRMEFGMSKCKVLHINKGQWRNQPEKEVVTGQPLDNMDKDETYKYLGFNQSVKIDHTQVKAQLTQEFKDRLIKLLKTKLNSKNLTKAINTFAIPVLTYSFGIIKWSHTDIENIHILIRTELTKHRMSHPNACKERLAIDRKLGGRGIIDIQSLRTTQIQTLRHFFHTKQTNLHKAVVKADKNYTPLNLSSSDHVADTYNHIQSQQEKINTWSQKALHGKHRYRVTQDHINQKQSYAWLQDGQLFPETEGFMLAIQDQVIATRNYKKYIIKDPSITDDNCRKCQQQKETIDHITSGCKTLAGTEYTARHNSAAKVIHQALATTNKLIENTDPYYNYTPTSVLENDQYKLYWDVEIHTDKTISANRPDIVFQSKADKITYLIDIAIPNDVNIQNTYAGKISKYTDLAMEIKRLWKQNKVTIVPLIMSVSGLTPSTFTQHLQQLGLDEKLHKVFQKSVILKTCNIVRSFLNSDQ

SEQ ID NO: 32392 - protein, 989 aa, Callosobruchus maculatus
MNTQYNKWCGTNPTLRDPLPRLIFRNNTRQILQTVNSNIIPQFLTKDSNLEDIHTVIYAAAATTLIVNGQKFPKRSKDHTSKRSKPKWQIRIENKISTIRKDLAHVTQYIHKNNLSKRIQTTISRLKSRSPQQTISEIYDTLKQKLAVYAARLRRYNESNDRKDTNNLFQKSERHFYQKITSNNQITTIEPPSRKELTDFWGSLWSEPKTHNEKAPWIRQEEEKQQHIPEQGDVILTPQEIAETIKHTHNWKCPGVDNVQNFWYKQFSATYEMLTDQINKAILQPNRLPKFLTQGVTYIKPKNADTKNPANYRPITCLPTLYKIITATIGKRIEQHLTQNNILTEEQKGCRKQSQGCKEQLIIDSVIMEQTRKEHRNLHTCFIDYKKAFDSVPHSWLTKTLQIYKINPTLRQFLTRIMETWRTNIHLKTQDGHIQTEELYIRRGIFQGDSLSSLWFCLCLNPLSNALHNTNYGFNIRHQKVNQHRISHLLYMDDIKLYAATEVQLKELLKITEVCTSDVRMEFGMSKCKVLHIHKGQWKNHSEQEILTGETLDNMEKDETYKYLGFNQNIKIDHSEVKAQLTQEFRDRLITLLKTKLNSKNLTKAINTFAIPVLKYSFGIVKWSHTDIENINILIRTELTKHRMSHPKACKERLTIDRKHGGRGIIDIQSLHTRQIKTLRDFFQSKETNLHRSIVKADKNYTPLTLSRPDHPADAHNHIELQQEKINTWSQKALHGKHRYRVTQDHINERQSYTWLQDGQLFPETEGFMLAIQDQVIATRNYMKYIIKDTSITDDNCRKCHQQKETIDHITSACKTLAGTEYTARHNSAAKVIHQALATTNKLIENTDPYYNYTPTSVLENNEYKLYWDVEIHTDKTIPANRPDIVFQSKADKVTYLIDIAIPNDTNIQNAYAGKISKYTDLAIEIKRLWKQNKVTIVPLIMSVSGLTPNTFTPHLQQLGLDERLQKIFQKSVILKTCNIVRSFLNSDP

SEQ ID NO: 32393 - protein, 1260 aa, Callosobruchus maculatus
MDKVNLINNPRRPRVRRLNSPESQTRTQQPIAHNPAADVLPAQPATTKAGKPRQRLQWTTEMNKFVMRCYYTATKLETISTGYRHELHRLFIAQYPHLAERVTEQRLIDQKRVITKNNRLTPQELQAVKKLVANEINTVHPIDSLVTESITETQNIHTRNNQTTNTAKTNNISIQSAIDSEHEHTPNTPDTTFTNLPATTTESQQISQPPSVTQSAEAVNTAQPPSISGEPEQMTNSRTTQFNKRCNTTTQNQNQNIARSPSITQTAEQVMNTQFNKWCGTNPALRDPLPRLIFKNNTQQILHTINTNLIPQFITNNSNLEDIHTVIYAAAATTLIVNGQKLQKRSKDQRSNRAKPKWQIRIENKISTLRKDLAHLAQYSNNNNHPSKHIQRTINIMKSKSPQKSIPEIADTLKQKLAVYAARLRRYNESNDRKDANNLFQKSEKQFYQKITSNNQITTIEPPSRQELTAFWRSLWSEPKTHNENAPWIRQEETKHQHITEQGNVILTTEEIAETIKHTHNWKCPGVDNVQNFWYKQFSSTYEMLTDQINKAILQPNRLPKFLTQGITYIKPKNADTKNPANYRPITCLPTLYKIITATICRRIEQHLMQNNILTEEQKGCRKHSQGCKEQLIIDSVIMEQTRKEHRNLHTCFIDYKKAFDSVPHSWLMKTLQIYKINAGLRQFLKSTMETWRTNIHLQTHDGHIQTDELHIRCGIFQGDSLSSLWFCLCLNPLSNTLNSTNHGFNIRHHKADQHKINHLLYMDDIKLYAATEVQLRELLKITEVFTSDIRMEFGMSKCKVLHINKGQWKNQPEKEVVTGQPLDNMDKDETYKYLGFNQNVKIDHTQVKAQLTQEFKDRLIKLLKTKLNSKNLTKAINTFAIPVLTYSFGIIKWSHTDIENIHILIRTELTKHRMSHPNACKERLAIDRKLGGRGIMDIQSLRTTQIQTLRHFFHTKQTNLHKAIVKADKNYTPLNLSSPDHVADTYNHIQSQQEKINTWSQKALHGKHRYRVTQDHINQKQSYAWLQDGQLFPETEGFMLAIQDQVIATRNYKKYIIKDPSITDDNCRKCQQQKETIDHITSGCKTLAGTEYTARHNSAAKVIHQALATTNKLIENTDPYYNYTPTSVLENDQYKLYWDVEIHTDKTIPANRPDIVYQSKADKITYLIDIAIPNDVNIQNTYAGKISKYTDLSMEIKRLWKQNKVTIVPLIMSVSGLTPSTFTQHLQQLGLDEKLHKVFQKSVILKTCNIVRSFLNSDQ

SEQ ID NO: 32394 - protein, 1209 aa, Callosobruchus maculatus
MDRVNFMNNQRRPRVRRLNSPEPQTQTEQPIEHNPAADVLPTQPATTKAGKPRQRLQWTTEMNKSVMRCYYTATKLETISTGYRHELHRLFTTQYPHLSTRVTEQRLIDQKRVITKNNRLTPQELQDIKNLVSNEMNIVQPNHSLATEPIVETQNSHTQTSQTSNTAKTNNASIHSELSSEHDQTLDTPDTTITNLPSTTIQIQNITRPFAVTQSVEQVMSTQFNKWCGTNPALRDPLPRLIFKNNTQQILHTVNANVIPQFITDDSNLEDIHTVIYAAAATTLIVNGQKLSKRSKHQTSNRTKPKWQIRIENKISTIRKDLAHLAQYNINNDHPSRHIQRTINILKSKSPQQTIPEITDTLKQKLAVYAARLRRYNESNARKDANSLFQKSEKQFYQKITADNQITTIEPPSKQELTEFWGSLWSEPKTHNEDAPWIREEEEKHQHIAEQGDVILSKEEIVETIKHTHDWKCPGVDNVQNFWYKHFSSTYEVLTNQINKAIRQPDRLPKFLTQGITYIKPKNADTKNPANYRPITCLPTLYKIITATLCRRIEQHLTQNNILTEEQKGCRKQSQGCKEQLIIDSVIMEQTRKEHRNLHTCFIDYKKAFDSVPHSWLTKILQIYKINPGLRQFLAKTMKTWRTNIHLTTQDGHIQTEELHIRRGIFQGDSLSSLWFCLCLNPLSNALNNTNYGFNIRHQKVNLHRINHLLYMDDIKLYAASEVQLRELLKITEVCTLDVRMEFGMSKCKVLHINKGQWKNHSEQEIVTDQTLDNMGKDETYKYLGFNQNVKIDHTQVKAQLKQEFRDRLIRLLKTKLNSRNLTKAINTFAIPILTYSFGIIKWSHTDIENIHILMRTELTKHRMSHPNACKERLTVDGKQGGRGIIDIQSLHTRQIKTLRHFFQSKQTNLHGAIVKADKNYTPLNLSCPDHVADTYNHIQSQQEKINTWSQKALHGKHRYRVTQDHINEKQSYTWLQDGQLFPETEGFMLAIQDQVIATRNYKKYIIKDPSITDDNCRKCQQQKETIDHITSGCKTLAGTEYTARHNSAAKVIHQALATTNKLIENTDPYYNYTPTSVLENDQYKLYWDVQIHTDKTIPANRPDIVFQSKLDKVTYLIDIAIPNDVNIQNTYAGKISKYTDLAMEIKRLWKQDKVTIVPLIMSVSGLTPNTFTPHLQQLGLDEKLHKTFQKSVILKTCNIVRSFLNSDQ

SEQ ID NO: 32395 - protein, 1242 aa, Callosobruchus maculatus
MHKVTSKNNQRRPRVRRLNSPEPQTQTEQPRQHNPAADVLPAQPATTKAGKPRQRLQWTTEINKHVMHCYYTATQLETISTGYRHELHRLFIAQYPHLAERVTEQRLIDQKRVITKNNRLTPEELQAIKILVSNEINTAHPNHPQTSNRTTIDNTSIHSETDPEHEHTQHIPDSAVQPNDSLATESITERHAIRTRNNQPPNTGTTNTTSIHLELDLENDHTPETTCTNLPSTATQSQNITLPPAITQSAEQVMNTQYNKWCGTNPTLRDPLPRLIFKNNTLQILHTINVNIIPQFLTKDSDLEDIHTVIYAAAATALTLNGQKLPKRSIARTTERSKPKWQIRIENKISTIRKDLAHLAQYTNNNNRSKRVQTTINMLKSKSPQQTIPEIADTLKQKLAVYAARLRRYNESNARKDANNLFQKSEKQFYQKITADNQITAIEPPSKQELTEFWGSLWSEPKTHNENAPWIRQEEEKHQHIVEQEDVILTPEEIAETIKHTHNWKCPGVDNVQNFWYKQFSATYEMLTDQINKAILQPNRLPKFLTQGITYIKPKNADTKNPANYRPITCLPTLYKIITATICRRIEQHLTQNNILTEEQKGCRKQSQGCKEQLIIDSVIMEQTRKEHRNLHTCFIDYKKAFDSVPHSWLAKTLQIYKINPGLREFLASTMETWRTSIHLKTQDGLIKTDELHIRRGIFQGDSLSSLWFCLCLNPLSNALNNTNCGFNIRHDRLNQHKINHLLYMDDIKLYAANEVQLKELIRTTEACSSDVRMEFGMSKCKVLHINKGQWKDHPQQETVAGQTLNNMNKDETYKYLGFNQNVKIDHTQVKAQLTQEFRDRLIKLLKTKLNSRNLTKAINTFAIPVLTYSFGIIKWSHTDIENIHILIRTELTKHRMSHPNACKERLTIDRKQGGRGITDIQSLRTRQIKTLRHFFQNKQTNLHRAIVKADKNYTPLNLSCPDHVADTHNPTQSQQEKISTWSQKPLHGKHRYRITQDHINEKQSYTWLQDGQLFPETEGFMLAIQDQVIATRNYKKYVIKDPSITNDNCRKCQQQKETIDHITSACKTLAGTEYTARHNSAAKIIHQALATKNKLIENSDPYYKYTPTSVLENDHYKLYWDVEIHTDKTINANRPDIVFQIKADKVTYLIDIAIPNDVNVQNTYAGKISKYTDLAIEVKRIWKQDKVIIVPFIMSVSGLTPNTFTQHLQQLGLDESLHKIFQKSVILKTCNIVRSFLNSDQ

SEQ ID NO: 32396 - protein, 989 aa, Callosobruchus maculatus
MNTQYNKWCGTNPVLRDPLPRLIFKNNTRQILHTINANIIPQFLTNDSDLEDIHTVIYAAAATTLIVNGQKLPQRSKTHTSKRSKPKWQIRIENKISTLRKDLAHLTQYTNNNNLSKRIQTTINRLKSKSPQQTIPEIADTLKQKLAVYAARLRRYNESNDRKDANNLFQRSEKQFYQKMTSNNQITTTEPPSRQELTEFWGSLWSEPKTHNENAAWIRQEEEKHQHIAEQGDIVLTPEEIAETIKHTHNWKCPGVDNVQNFWYKQFSATYEMLTEQINKAILQPNRLPKFLTQGITYIKPKNADTRNPANYRPITCLPTLYKIITATIGKRIEQHLTQNNILTEEQKGCRKQSQGCKEQLIIDSVIMEQTRKEHRNLHTCFIDYKKAFDSVPHSWLKKTLQIYKINPVLRQFLTRTMETWRTNIHLKTQDGHIQTEELLIRRGIFQGDSLSSLWFCLCLNPLSNALNNTNYGFNIRHQKVNQHRINHLLYMDDIKLYAATEVQLKELLRITEVCTSDVRMEFGMSKCKVLHINKGQWKNQAEQEILTGQTLDNMDKDETYKYLGFNQNIKIDHTQVKAQLTQEFRDRLVKLLKSKLNSKNLTKAINTFAIPVLTYSFGIIKWSHTDIENIHILIRTELTKHRMSHPNACKERLTIDRKQGGRGIIDIQSLRARQIKTLRQFFQSKQTNLHRAIAKADKSYTPLNLSCLDHAADTHNPIQSQQEKINTWSQKPLHGKHRYRITQDQINEKQSYTWLQDGQLFPETEGFMLAIQDQVIATRNYKKYVIKDPSITNDNCRKCHQQKETIDHITSACKTLAGTEYTARHNSAAKIIHQALATKNKLIDNSDPYYKYTPTSVLDNDHYKLYWDVEIHTDKTINANRPDIVFQTKADKVTYLIDIAIPNDVNVQNTYAGKISKYTDLAIEVKRLWKQDKVIIVPLIMSVSGLTPNTFTQHLQQLGLDEGLHKIFQKSVILKTCNIVRSFLNSDQ

SEQ ID NO: 32397 - protein, 622 aa, Callosobruchus maculatus
MEQTRKEHRNLHTCFIDYKKAFDSVPHSWLTKILQIYKISPGLRQFLAKTMKTWRTNTHLTTQDGHIQTEELHIRRGIFQGDSLSSLWFCLCLNPVSNALNNTNYGFNIRHQKVNQHSINHLLYMDDIKLYAATDVQLRELLRITEVYTSDVRMEFGMNKCKVLHINKGQWKNHPEQEIVTGQTLDNMDKEETYKYLGFNQSVKIDHTQIKAELRQVFRDPLIKLLKTKLNSRNLTKAINTIAIPILTYSFGIIKWSHTDIENIHILIRTELTKHRMSHPNACKERLTIDRTQGGRGITDIQSLRTRQIKTLRHFFQNKQTNLHRAIVKADKNYTPLNLSCPDHVADTHNPTQSQQEKISTWSQKPLHGKHRYRVTQDHINKKQSYTWLQDGQLFPETEGSMLAIQDQVIATRNYKKYVIKDPSITDDNCRKCQQQKETIDHITSGCKTLAGTEYTARHNSAAKVIHQALATTNKLIENTDPYYNYTPTSVLENDQYKLYWDVQIHTDKTIPANRPDIVFQSKLDKVAYLIDIAIPNDVNIQNTYAGKISKYTDLAMEIKRLWKQDKVTIVPLIMSVSGLTPNTFTPHLQQLGLDEKLHKTFQKSVILKTCNIVRSFLNSDQ

SEQ ID NO: 32398 - protein, 1245 aa, Callosobruchus maculatus
MHRVTSKNNQRRPRVRRLNSPKPQTQTEQPIERNPAADVLPAQPATTKAGKPRQRLQWTTEMNKSVMHCYYTATRLETISTGYRHELHRLFIAQYPHLAERVTEQRLIDQKRVITKNNRLTPEELQAIKILVSNEVNTVRQNDPQTSNTTTSDNTTIPTEIDPEHEHTQDRPDTAVQPNDSLAIESITEGHTTHNRNNQPPNKDTTKDTSIHLEIDPEHDHAPHTPETTCSNLPSTATQSQNITLPPAITQSAKQVMNTQYNKWCGTNPVLRDPLPRLIFKNNTRQILHTINANIIPQFLTNDSDLEDIHTVIYAAAATTLIVNGQKLPKRSKNHTSRRSKPKWQIRIENKISTLRKDLAHVTQYTNNNNLSKRIQTTINRLKSKSPQQTIPEIADTLKQKLAVYAARLRRYNESNDRKDANNLFQKSEKQFYQKMTSNNQITTTEPPSRQELTEFWGSLWSEPKTHNENAPWIRQEEEKHQHIAEQGDVVFTPDEIAETIKHTHNWKCPGVDNVQNFWYKQFSATYEMLTEQINKAILQPNRLPKFLTQGITYIKPKNGDTKNPANYRPITSLPTLYKIITATIGKRIEQHLIQNNILTEEQKGCRKQSQGCKEQLIIDSVIMEQTRKEHRNLHTCFIDYKKAFDSVPHSWLTKTLQIYKINPVLSQFLTRTMETWRTNIHLKTQDGHIQTEELLIRRGIFQGDSLSSLWFCLCLNPLSNALNNTNYGFNIRHQKVNQHRINHLLYMDDIKLYAATEVQLKELLRITEVCTSDVRMEFGMSKCKVLHINKGQWKNQSEQEILNGETLDNMDKDETYKYLGFNQNIKIDHTQAKAQLTQEFRNRLLKLLKSKLNSKNLTKAINTFAIPVLTYSFGIIKWSHTDIENIHILIRTELTKHRMSHPNACKERLTIDRKQGGRGIIDIQSLHTRQTKTLRDFFQSKQTNLHRSIVKADKNYTPLNLSRSDHSADGHNHIELQQEKINTWSQKALHGKHRYRVTEEHINERQSYTWLQDGQLFPETEGFMLAIQDQVIATRNYMKYIIKDTSITDDNCRKCHQQKETIDHITSGCKTLAGTEYTARHNSAAKVIHQALATTNKLIENTDPYYNYTPTSVLENNEYKLYWDVEIHTDKTIPANRPDIVFQSKADKVTYLIDIAIPNDTNIQNAYAGKISKYTDLAIEIKRLWKQNKVTIVPLIMSVSGLTPNTFTPHLQQLGLDEKLHKIFQKSVILKTCNIVRSFLNSDP

SEQ ID NO: 32399 - protein, 1209 aa, Callosobruchus maculatus
MDRVNFMNNQRRPRVRRLNSPEPQTQTEQPIEHNPAADVLPTQPATTKAGKPRQRLQWTTEMNKSVMRCYYTATKLETISTGYRHELHRLFTTQCPHLSTRVTEQRLIDQKRVITKNNRLTPQELQDIKNLVSNEMNIVQPNDSLTTEQIVETQNSDTQTSQTSNTAKTNNTSIHSQLGPEYDQALDTPDTTITNLPSTIIQIQNITRPFAVTQSVEQVMSTQYNKWCGTNPALRDPLPRLIFKNNAQQILHTVNANVIPQFIRDDSNLEDIHTVIYAAAATTLIVNGQKLSKRSKHQTSNRTKPKWQIRIENKISTIRKDLAHLAQYTINNNHPSRHIQRTINILKSKSPQQTIPEITDTLKQKLAVYAARLRRYNESNARKDANSLFQKSEKQFYQKITADNQITTIEPPSIQELTEFWGSLWSEPKTHNEDAPWIREEEEKHQHIAEQGDVILSKEEIVETIKHTHDWKCPGVDNVQNFWYKHFSSTYEVLTNQINKAIRQPDRLPKFLTQGITYIKPKNADTKNPANYRPITCLPTLYKIITATLCRRIEQHLTQNNILTEEQKGCRKQSQGCKEQLIIDSVIMEQTRKDHRNLHTCFIDYKKAFDSVPHSWLTKILQIYKINPGLRQFLAKTMKTWRTNIHLTTQDGHIQTEELHIRRGIFQGDSLSSLWFCLCLNPLSNALNNTNYGFNIRHQKVNQHRINHLLYMDDIKLYAATDVQLRELLRITEVYTSDVRMEFGMNKCKVLHINKGQWKNHPEQEIVTGQTLDNMDKEETYKYLGFNQSVKIDHTQIKAELRQVFRDRLIKLLKTKLNSRNLTKAINTFAIPILTYSFGIIKWSHTDIENIHILIRTELTKHRMSHPNACKERLTIDRTQGGRGIIDIQSLRTRQIKTLRHFFQNKQTNLHRAIVKADKNYTPLNLSCPDHVADTHNPTQSQQEKISTWSQKPLHGKHRYRVTQDHINKKQSYTWLQDGQLFPETEGFMLAIQDQVIATRNYKKYIIKDPSITDDNCRKCQQQKETIDHITSGCKSLAGTEYTARHNSAAKVIHQALATTNKLIENTDPYYNYTPTSVLENDQYKLYWDVQIHTDKTIPANRPDIVFQSKLDKVTYLIDIAIPNDVNIQNTYAGKISKYTDLAMEIKRLWKQDKVTIVPLIMSVSGLTPNTFTPHLQQLGLDEKLHKTFQKSVILKTCNIVRSFLNSDQ

SEQ ID NO: 32400 - protein, 952 aa, Callosobruchus maculatus
MFCRHSRQPPKLVNIHTVIYAAAATTLIVNGQKLSKRSKHQTSNKTKPKWQIRIENKISTIRKDLAHLAQYTINNNHPSRHIQRTINILKSKSPQQTIPEITDTLKQKLAVYAARLRRYNESNARKDANNLFQKSEKQFYQKITANNQITTIEPPSKQELTEFWGSLWSEPKTHNEDAPWIREEEEKHQHIAEQGDVILSKEEIVETIKHTHDWKCPGVDNVQNFWYKHFSSTYEVLTNQINKAIRQPDKLPKFLTQGITYIKPKNADTKNPANYRPITCLPTLYKIITATLCRRIEQHLTQNNILTEEQKGCRKQSQGCKEQLIIDSVIMEQTRKEHRNLHTCFIDYKKAFDSVPHSWLTKILQIYKINPGLRQFLAKTMKTWRTNIHLTTQDGHIQTEELHIRRGIFQGDSLSSLWFCLCLNPLSNALNNTNYGFNIRHQKVNQHRINHLLYMDDIKLYATSDVQLRELLRITEVYTSDVRMEFGMNKCKVLHINKGQWKNHPEQEIVTGQTLDNMDKEETYKYLGFNQSVKIDHTQIKAELRQVFRDRLIKLLKTKLNSRNLTKAINTFAIPILTYSFGIIKWSHTDIENIHILIRTELTKHRMSHPNACKERLTIDRTQGGRGITDIQSLRTRQIKTLRHFFQNKQTNLHRAIVKADKNYTPLNLSCPDHVADTHNPTQSQQEKISTWSQKPLHGKHRYRVTQDHINKKQSYTWLQDGQLFPETEGFMLAIQDQVIATRNYKKYIIKDPSITDDNCRKCQQQKETIDHITSGCKTLAGTEYTARHNSAAKVIHQALATTNKLIENTDPYYNYTPTSVLENDQYKLYWDVQIHTDKTIPANRPDIVFQSKLDKVTYLIDIAIPNDVNIQNTYAGKISKYTDLALEIKRLWKQDKVTIVPLIMSVSGLTPNTFTPHLQQLGLDEKLHKTFQKSVILKTCNIVRSFLNSDQ

SEQ ID NO: 32401 - protein, 1209 aa, Callosobruchus maculatus
MDRVNFMNNQRRPRVRRLNSPEPQTQTEQPIEHNPAADVLPTQPATTKAGKPRQRLQWTTEMNKSVMRCYYTATKLETISTGYRHELHRLFTTQYPHLSTRVTEQRLIDQKRVITKNNRLTPQELQDIKNLVSNEMNIVQPNDSLTTEQIVETQNSDTQTSQISNTAKTNNTSIHSELGPEHDQALDTPDTTITNPPSTIIQIQNITRPFAVTQSVEQVMSTQYNKWCGTNPALRDPLPRLIFKNNTQQILHTVNANVIPQFIRDDSNLEDIHTVIYAAAATTLIVNGQKLSKRSKHQTSNRTKPKWQIRIENKISTIRKDLAHLAQYTINNNHPSRHIQRTINILKSKSPQQTIPEITDTLKQKLAVYAARLRRYNESNARKDANSLFQKSEKQFYQKITADNQIATIEPPSKQDLTEFWGSLWSEPETHNEDAPWIREEEEKHQHIAEQGDIILSKEEIVETIKHTHDWKCPGVDNVQNFWYKHFSSTYEVLTNQINKAIRQPDRLPKFLTQGITYIKPKNADTKNPANYRPITCLPTLYKIITATLCRRIEQHITQNNILTKEQKGCRKQSQGCKEQLIIDSVIMEQTRKEHRNLHTCFIDYKKAFDSVPHSWLTKILQIYKINPGLRQFLAKTMKTWRTNIHLTTQDGHIQTEELHIRRGIFQGDSLSSLWFCLCLNPLSNALNNTNYGFNIRHQKVNQHRINHLLYMDDIKLYAATDVQLRELLRITDVYTSDVRMEFGMNKCKVLHINKGQWKNHPEQEIVTGQTLDNMDKEETYKYLGFNQSVKIDHTQIKAELRQVFRDRLIKLLKTKLNSRNLTKAINTFAIPILTYSFGIIKWSHTDIENIHILIRTELTKHRMSHPNACKERLTIDRTQGGRGITDIQSLRTRQIKTLRHFFQNKQTNLHRAIVKADKNYTPLNLSCPDHVADTHNPTQSQQEKISTWSQKPLHGKHRYRVTQDHINRKQSYTWLQDGQLFPETEGFMLAIQDQVIATRNYKKYIIKDPSITDDNCRKCQQQKETIDHITSGCKTLAGTEYTARHNSAAKVIHQALATTNKLIENTDPYYNYTPTSVLENDQYKLYWDVQIHTDKTIPANRPDIVFQSKLDKVTYLIDIAIPNDVNIQNTYAGKISKYTDLAMEIKRLWKQDKVTIVPLIMSVSGLTPNTFTPHLQQLGLDEKLHKTFQKSVILKTCNIVRSFLNSDQ

SEQ ID NO: 32402 - protein, 1245 aa, Callosobruchus maculatus
MHRVTSKNNQRRPRVRRLNSPEPQTQTEQPIERNPAADVLPAQPATTKAGKPRQRLQWTTEMNKSVMHCYYTATRLETISTGYRHELHRLFIAQYPHLAERVTEQRLIDQKRVITKNNRLTPEELQAIKILVSNEVNTVRQNDPQTSNTTTSDNTTIPTEIDPEHEHTQDRPDTAVQPNDSLAIESITEGHTIHTRNNQPPNKDTTKDTSIHLEIDPEHDHAPHTPETTCSNLPSTATQSQNITLPPAITQSAKQVMNTQYNKWCGTNPVLRDPLPRLIFKNKTRQILHTINANIIPQFLTNDSDLEDIHTVIYAAAATTLIVNGQKLPKRSKNHTSKRSKPKWQIRIENKISTLRKDLAHVTQYTNNNNLSKRIQTTINRLKSKSPQQTIPEIADTLKQKLAVYAARLRRYNESNDRKDANNLFQKSEKQFYQKMTSNNQITTTEPPSRQELTEFWGSLWSEPKTHNENAPWIRQEEEKHQHIAEQGDVVFTPDEIAETIKHTHNWKCPGVDNVQNFWYKQFSATYEMLTEQINKAILQPNRLPKFLTQGITYIKPKNGDTRNPANYRPITCLPTLYKIITATIGKRIEQHLTQNNILTEEQKGCRKQSQGCKEQLIIDSVIMEQTRKEHRNLHTCFIDYKKAFDSVPHSWLTKTLQIYKINPVLRQFLTRTMETWRTNIHLKTQDGHIQTEELLIRHGIFQGDSLSSLWFCLCLNPLSNALNNTNYGFNIRHQKVNQHRINHLLYMDDIKLYAATEVQLKELLRITEVCTSDVRMEFGMSKCKVLHTNKGQWKNQSEQEILTGEMLDNMDKDETYKYLGFNQNIKIDHTQAKAQLTQEFRNRLLKLLKSKLNSKNLTKAINTFAIPVLTYSFGIIKWSHTDIENIHILIRTELTKHRMSHPNACKERLTIDRKQGGRGIIDIQSLHTRQIKTLRDFFQSKQTNLHRSIVKADKNYTPLNLSRSDHSADGHNHIELQQEKINTWSQKALHGKHRYRVTQEHINERQSYTWLQDGQLFPETEGFMLAIQDQVIATRNYMKYIIKDTSITDDNCRKCHQQKETIDHITSGCKTLAGTEYTARHNSAAKVIHQALATTNKLIENTDPYYNYTPTSVLENNEYKLYWDVEIHTDKTIPANRPDIVFQSKADKVTYLIDIAIPNDTNIQNAYAGKISKYTDLAIEIKRLWKQNKVTIVPLIMSVSGLTPNTFTPHLQQLGLDEKLHKIFQKSVILKTCNIVRSFLNSDP

SEQ ID NO: 32403 - protein, 810 aa, Callosobruchus maculatus
MTSNNQITTTEPPSRQELTEFWGSLWSEPKTHNENAAWIRQEEEKHQHIAEQGVIVLTPEEIAETIKHTHNWKCPGVDNVQNFWYKQFSATYEMLTEQINKAILQPNRLPKFLTQGITYIKPKNADTRNPANYRPITCLPTLYKIITATIGKRIEQHLTQNNILTEEQKGCRKQSQGCKEQLIIDSVIMEQTRKEHRNLHTCFIDYKKAFDSVPHSWLKKTLQIYKINPVLCQFLTRTMETWRTNIHLKTQDGHIQTDELLIRRGIFQGDSLSSLWFCLCLNPLSNALKNTNYGFNIRHQKVNQHRINHLLYMDDIKLYAATEVQLKELLRITEVCTSDVRMEFGMSKCKVLHINKGQWKNQSEQEILTGQTLDNMDKDETYKYLGFNQNIKIDHTQVKAQLTQEFRDRLVKLLKSKLNSKNLTKAINTFAIPVLTYSFGIIKWSHTDIENIHILIRTELTKHRMSHPNACKERLTIDRKQGGRGIIDIQSLRARQIKTLRHFFQSKQTNLHRAITKADKSYTPLNLSSPDHAADTHNPIQSQQEKINTWSQKPLHGKHRYRITQDQINEKQSYTWLQDGQLFPETEGFMLAIQDQVIATRNYKKYVIKDPSITNDNCRKCHQQKETIDHITSACKTLAGTEYTARHNSAAKIIHQALATKNKLIDNSDPYYKYTPTSVLDNDHYKLYWDVEIHTDKTINANRPDIVFQTKADKVTYLIDIAIPNDVNVQNTYAGKISKYTDLAIEVKRLWKQDKVIIVPLIMSVSGLTPNTFTQHLQQLGLDEGLHKTFQKSVILKTCNIVRSFLNSDQ

SEQ ID NO: 32404 - protein, 982 aa, Callosobruchus maculatus
MVWHKSYTTRSLPRLIFKNNTRQILQTVNSNIIPQFLKKDSNLEDIHTVIYAAAATTLIVNGQKLPKRSKDHTSKRSKPKWQIRIENKISTIRKDLAHVTQYIHKNNLSKRIQTTISRLKSRSPQQTISEIYDTLKQKLAVYAARLRRYNESNDRKDTNNLFQKSERQFYQKITSNNQITTIEPPSRKELTDFWGSLWSEPKTHNENAPWIRQEEEKQQHIPEQGDVILTPQEIEETIKHTHNWKCPGVDNVQNFWYKQFSATYEMLTDQINKAILQPNRLPKFLTQGVTYIKPKNADTKNPANYRPITCLPTLYKIITATIGKRIEQHLTQNNILTEEQKGCRKQSQGCKEQLIIDSVIMEQTRKEHRNLHTCFIDYKKAFDSVPHSWLTKTLQIYKINPTLRQFLTRIMETWRTNIHLKTQDGHIQTEELYIRRGIFQGDSLSSLWFCLCLNPLSNALNSTNYGFNIRHQKVNQHRISHLLYMDDIKLYAATEAQLKELLKITEVCTSDVRMEFGMSKCKVLHIHKGQWKNHSEQEILTGETLDNMEKDETYKYLGFNQNIKIDHSEVKAQLTQEFRDRLITLLKTKLNSKNLTKAINTFAIPVLTYSFGIIKWSHTDIENINILIRTELTKHRMSHPKACKERLTIDRKHGGRGIIDIQSLHTRQIKTLRDFFQSKETNLHRSIVKADKNYTPLTLSRPDHPADAHNHIELQQEKINTWSQKALHGKHRYRVTQDHINERQSYTWLQDGQLFPETEGFMLAIQDQVIATRNYMKYIIKDTSITDDNCRKCHQQKETIDHITSACKTLAGTEYTARHNSAAKVIHEALATTNKLIENTDPYYNYTPTSVLENNEYKLYWDVEIHTDKTIPANRPDIVFQSKADKVTYLIDIAIPNDTNIQNAYAGKISKYTDLAIEIKRLWKQNKVTIVPLIMSVSGLTPNTFTPHLQQLGLDERLHKIFQKSVILKTCNIVRSFLNSDP

SEQ ID NO: 32405 - protein, 1207 aa, Callosobruchus maculatus
MDKVSFSNNQRRPRVRRLNSPEPQSQTQQPIAHNPTADVLPVQPATTKAGKPRQRLQWTTEMNKSVMHCYYTATRLETISTGYRHELYRLFTAQYPHLSTRVTEQRLIDQKRVITKNNRLTPQELQAIKSLVSNEINTVTPNDSLADESITERQNNHTGSNQTPNTDTTNNTSIHLDVESEHEHIPDTPDQTSINLPSTATQSQNVTPPPCITQSTEQVMNTQYNKWCGTNPTLRDPLPRLIFKNNTRQILQTVNSNIIPQFLTKDSNLEDIHTVIYAAAATTLIVNGQKLPKRSKDHTSKRSKPKWQIRIENKISTIRKDLAHVSQYIHKNNLSKRIQTTISRLKSRSPQQTISEIYDTLKQKLAVYAARLRRYNESNDRKDTNNLFQKSERQFYQKITSNNQITIEPPSRKELTDFWGSLWSEPKTHNENAPWIRQEEEKQQHIPEQGDVILTPQEIAETIKHTHNWKCPGVDNVQNFWYKQFSATYEMLTDQINKAILQPNRLPKFLTQGVTYIKPKNADTKNPANYRPITCLPTLYKIITATIGKRIEQHLTQNNILTEEQKGCRKQSQGCKEQLIIDSVIMEQTRKEHRNLHTCFIDYKKAFDSVPHSWLPKTLQIYKINPTLRQFLTRIMETWRTNIHLKTQDGHIQTEELYIRRGIFQGDSLSSLWFCLCLNPLSNALNNTNYGFNIRHQKVNQHRISHLLYMDDIKLYAATEVQLKELLKITEVWTSDVRMEFGMSKCKVLHIHKGQWKNHSEQEILTGETLDNMEKDETYKYLGFNQNIKIDHSEVKAQLTQELRDRLITLLKTKLNSKNLTKAINTFAIPVLTYSFGIIKWSHTDIENINILIRTELTKHRMSHPKACKERLTIDRKHGGRGIIDIQSLHTRQIKTLRDFFQSKETNLHRSIVKADKNYTPLILSRPDHPADAHNHIELQQEKINTWSQKALHGKHRYRVTQDHINERQSYTWLQDGQLFPETEGFMLAIQDQVIATRNYMKYIIKDTSITDDNCRKCHQQKETIDHITSACKTLAGTEYTARHNSAAKVIHQALATTNKLIENTDPYYNYTPTSVLENNEYKLYWDVEIHTDKTIPANRPDIVFQSKADKVTYLIDIAIPNDTNIQNAYAGKISKYTDLAIEIKRLWKQNKVTIVPLIMSVSGLTPNTFTPHLQQLGLDERLHKIFQKSVILKTCNIVRSFLNSDP

SEQ ID NO: 32406 - protein, 1207 aa, Callosobruchus maculatus
MDRVNFINNQRRPRVRRLNSPEPQTEKEEPIGDNPVADVLPVQPATTKAGKPRQRLQWTTEMNTSVMHCYYTATKLETISTGYRHELHRLFTAQYPHLSARVTEQRLIDQKRVITKNNRLTPQQLQAVKNLVADEINTVETNDSLVNESITESQHDHTLDDKTPNTNTTNTTSTHLEENPEHEFIPDAPDTVCTNRPPTTTRNQNVTQTPSFTQSAEQVMNAQFNKWCGTNPALRDPLPRLIFNSNTQKILHTININVIPQFLTSGSNLEDIHTVIYAAAAATLIVNGQKLPKRSNNHTSKRSKPKWQMRIENKITTIRKELAHLAQYTNNNNRSKRIQTTIDILKSKSPQKSIPEITDTLKQKLAVYAARLRRYNESNDRKDANNLFQKSEKQFYKKITTDNQITATELPSKQALTEFWGSLWSEPKTHNENAPWIRQEEEKHQHIAEQGNVILTPEEIAETIKHTHNWKCPGVDNIQNFWYKQFSSVYEVLTDQINKAILQPNRLPKFLTQGITYIKPKNADTKNPANYRPITCLPTLYKIITATICRRIEKHLTENSILTEEQKGCRKQSQGCKEQLIIDSVIMEQTRKEHRNLHTCFIDYKKAFDSVPHSWLTKTLQIYKINSGLRQFLTRTMETWRTNIHLQTEDGHIQTDELHIRRGIFQGDSLSSLWFCLCLNPLSNTLNSTNCGFTIRHQKANQHKINHLLYMDDLKLYAATEVQLRELLRITEVCTSDIKMEFGMSKCKVLHINKGQWKNHPEQEVVTGQALDNMDKDETYKYLGINQNAKIDHTKIKSQLTQEFKDRLTRLLKTKLNSRNLTKAINTFAIPILTYSFGIIKWSHTDIENIHILIRTELTKHRMSHPKACKERLTIDRKQGGRGIIDIQSLHAKQIKSLRHFFHSKQTNLHKAIVKADKNYTPLALSCPDHAADAHNHIQAQQEKINTWSQKALHGKHRYRVTQDHINEKQSYTWLQDGQLFPETEGFMLAIQDQVIATRNYRKYIMKDPSISDDNCRKCHQQKETIEHITSGCKTLAGTEYTARHNSAAKVIHQALATTNKLIENTDPYYNYTPTSVLENNQFKLYWDIEIHTDKTIPANRPDIVFQSKTDKVTYLIDIAIPNDMNIQNTYAGKISKYTDLAIEIKRLWKQNKVVIVPLIMSVSGLTPNTFTPHLQQLGLDEKLHKTFQKSVILKTCSIVRSFLNSE

SEQ ID NO: 32407 - protein, 989 aa, Callosobruchus maculatus
MNAQFNKWCGTNPALRDPLPRQIFNSNTQKILHTINTNVIPQFLTSGSNLEDIHTVIYAAAAATLIVNGQKLPKRSINCETSKRSKPKWQMRIENKITTIRKELAHLAQYTNNNNRSKRIQTSIDVLKSKSPQKSIREITDTLKQKLAVYAARLRRYNESNDRKDANNLFQKSEKQFYKKITTDKQITATELPSKQELTEFWGSLWSEPKTHNENAPWIRQEEEKHQHIVEQGNVILTPEEIAETIKHTHNWKCPGVDNIQNFWYKQFSSVYEVLTDLINKAILQPNRLPKFLTQGITYIKPKNADTKNLANYRPITCLPTLYKIITATICRRIEKHLTENSILTEEQKGCRKQSQGCKEQLIIDNVIMEQTRKEHRNLHTCFIDYKKAFDSVPHSWLTKTLEIYKINPGLRQFLTRTMETWRTNIHIQTEDGHIQADELHIRRGIFQGDSLSSLWFCLCLNPLSNTLNSTNCGFTIRHQKANQHKINHLLYMDDLKLYAATEVQLRELLRITEVCTSDIKMEFGMSKCKVLHINKGQWKNHPEQEVVTGQALDNMDKDETYKYLGINQNAKIYHTKIKSQLTQEFKDRLIRLLKTKLNSRNLTKAINTFAIPILTYSFGIIKWSHTDIENIHILIRTELTKHRMSHPKACKERLTIDRKQGGRGIIDIQSLHAKQIKSLRHFFHSKQTNLHKAIVKADKNYTPLALSCPDHVADAHNHIQAQQEKINTWSQKALHGKHRYRVTQDHINEKQSYTWLQDGQLFPETEGFMLAIQDQVIATRNYKKYIMKDPSISDGNCRKCHQQKETIEHITSGCKTLGGTEYTARHNSAAKVIHQALATTNKLIENTDPYYNYTPTSVLENNQFKLYWDIEIHTDKTIPANRPDIVFQSKTDKVTYLIDIAIPNDMNIQNTYAGKISKYTDLAIEIKRLWKQNKVVIVPLIMSVSGLTPNTFTPHLQQLGLDEKLHKTFQKSVILKTCSIVRSFLNSE

SEQ ID NO: 32408 - protein, 717 aa, Callosobruchus maculatus
MLTDQINKAILQPNRLPKFLTQGVTYIKPKNADTKNPANYRPITCLPTLYKIITATIGKRIEQHLTQNNILTEEQKGCRKQSQGCKEQLIIDSVIMEQTRKEHRNLHTCFIDYKKAFDSVPHSWLTKTLQIYKINPTLRQFLTRTMETWKTNIHLKTQDGHIQTEELCIRRGIFQGDSLSSLWFCLCLNPLSNALNNTNYGFNIRHQKVTQHRINHLLYMDDIKLYAATEVQLKELLKITEVCTSDVRMEFGMSKCKVLHIHKGQWKNHSEQEILTGQTLDNMEKDETYKYLGFNQNIKIDHSEVKAQLTQEFRDRLITLLKTKLNSKNLTKAINTFAIPVLTYSFGIIKWSHTDIENINILIRTELTKHRMSHPKACKERLTIDRKHGGRGIIDIQSLHTRQIKTLRDFFQSKETNLHRSIVKADKNYTPLTLSRPDHPADAHNHIELQQEKINTWSQKALHGKHRYRVTQDHINERQSYTWLQDGQLFPETEGFMLAIQDQVIATRNYMKYIIKDTSITDDNCRKCHQQKETIDHRTSACKTLAGTEYTARHNSAAKVIHQALATTSKLIENTDPYYNYTPTSVLENNEYKLYWDVEIHTDKTIPANRPDIVFQSKADKVTYLIDIAIPNDTNIQNAYAGKISKYTDLAIEIKRLWKQNKVTIVPLIMSVSGLTPNTFTPHLKQLGLDERLHKIFQKSVILKTCNIVRSFLNSDP

SEQ ID NO: 32409 - protein, 1207 aa, Callosobruchus maculatus
MDRVNFINNQRRPRVRRLNSPEPQTEKEEPIGDNPVADVLPVEPATTKAGKPRQRLQWTTEMNTSVMHCYYTATKLETISTGYRHELHRLFTAQYPHLSARVTEQRLIDQKRVITKNNRLTPQQLQAIKNLVADQINTAETNDSLVNESITETQHDHTLNDKTPNTNTTNTTSTHLEENPEHEFIPDAPDRVCTNRPPTTTRNQNVTQTPSFTQSAEQVMNAQFNKWCGTNPALRDPLPRLIFNSNTQKILHTINTNVIPQFLTSGSNLEDIHTVVYAAAAATLIVNGQKLPKRSNNHTSKRSKPKWQMRIENKITTIRKELAHLAQYTNNNNRSKRIQTTIDILKSKSPQKSIPEITDTLKQKLAVYAARLRRYNESNDRKDANNLFQKSEKQFYKKITTDNQITATELPSKQELTEFWGSLWSEPKTHNENAPWIRQEEEKHQHIAEQGNVILTPEEIAETIKHTHNWKCPGVDNIQNFWYKQLSSVYEVLTDQINKAILQPNRLPKFLTQGITYIKPKNADTKNPANYRPITCLPTLYKIITATICRRIEKHLTENSILTEEQKGCRKQSQGCKEQLIIDSVIMEQTRKEHRNLHTCFIDYKKAFDSVPHSWLTKTLQIYKINPGLRQFLTRTMETWRTNIHLQTEDGHIQTDELHIRRGIFQGDSLSSLWFCLCLNPLSNTLNSTNCGFTIRHQKANQHKINHLLYMDDLKLYAATEVQLRELLRITEVCTSDIKMEFGMSKCKVLHINKGQWKNHPEQEVVTGQALDNMDKDETYKYLGINQNAKIDHTKIKSQLTQEFKDRLIRLLKTKLNSRNLTKAINTFAIPILTYSFGIIKWSHTDIENIHILIRTELTKHRMSHPKACKERLTIDRKQGGRGIIDIQSHHAKQIKSLRHFFHSKQTNLHKAIVKADKNYTPLALSCPDHAADAHNHIQAQQEKINTWSQKALHGKHRYRVTQDHINEKQSYTWLQDGQLFPETEGFMLAIQDQVVATRNYKKYIMKDPSISDDNCRKCHQQKETIEHITSGCKTLAGTEYTARHNSAAKVIHQALATTNKLIENTDPYYNYTPTSVLENNQFKLYWDIEIHTDKTIPANRPDIVFQSKTDKVTYLIDIAIPNDMNIQNTYAGKISKYTDLAIEIKRLWKQNKVVIVPLIMSVSGLTPNTFTPHLQQLGLDEKLHKTFQKSVILKTCSIVRSFLNSE

SEQ ID NO: 32410 - protein, 990 aa, Callosobruchus maculatus
MNIQFNKWCGTNPTLRDPLPRLIFKNNTQQILHSINANIIPQFITNDSTLEDIHTVIYAAAATTLILNGQKLPKRSTDHTTERSKPKWQIRIENKISAIRKDLAHVAQYTNNNNPSKRVQRTVNILKSKSPQQTVPEIADTLKQKLAVYAARLRRYNESNARKDANNLFQKSEKQFYQKITSDNQITTIEPPSKQELTEFWGSLWSEPKTHNEDAPWIKQEEQKHQHIEEQGDIILTPEEIAETIKHTHNWKCPGVDNIQNFWYKQFSATYEMLANQINKAIIQPERFPKFLTQGITYIKPKNADTKNPANYRPITFLPTLYKIVTATICRRIEQHLTQNSILTEEQKGCRKQSQGCKEQLIIDSVIMEQTRKEHRSLRTCFIDYKKAFDSVPHSWLTKILQIYKINPGIRRFLTRTMETWRTSIHLKTQDGHIQTEELNIRRGIFQGDSLSSLWFCLCLNPLSNALNSTNYGSNIRHQKANQHRINHLLYMDDIKLYAATDVQLRELLRITEVCTSDVRMEFGMSKCKVLHINKGQWKNHPQQEIVTGQTLDNMDKEETYKYLGFNQSVKIDHTQTKAQLRQVFRDRLIKLLKTKLNSRNLTKAINTFAIPILTYSFGIIIKWSHTDIENIHILIRTELTKHRMSHPNACKERLTINRKQGGRGIIDIQSLHSRQIKTLRHFFQSKQTNLHRSIVKADKNYTPLNLSCPDHAADTYNHIQSQQEKINTWSQKALHGKHRYRVTQDHINERQSYTWLHDGQLFPETEGFMLAIQDQVIATQNYKKYIIKDPSITDDNSRKCHQQKETIDHITSGCKTLAGTEYTARHNSAAKVIHQALATTNKLIENTDPYYNYTPKSVLENNQYKLYWDVEIHTDKTIPANRPDIVFQSKLDKVTYLIDIAIPNDVNIQNTYAGKISKYTDLAMEIKRLWKQDKVTIVPFIMSVSGLTPNTFTPHLQQLGLDERLHKTFQKSVILKTCNIVRSFLNPDQ

SEQ ID NO: 32411 - protein, 988 aa, Callosobruchus maculatus
MNTQYNKWCGTNPVLRDPLPRLIFKNNTRQILHTINANIIPQFLTNDSDLEDIHTVIYAAAATTLIVNGQKLPKRSKNHTSKRSKPKWQIRIENKSSTLRKDLAHVTQYTNNNNLSKRIQTTINRLKSKSPQQTIPEIADTLKQKLAVYAARLRRYSESNDRKDANNLFKKSEKQFYQKMTSNNQITTTEPPSRQELTEFWGSLWSEPKTHNENAPWIRQEEEKHQHIAEQGDVAFTPDEIAETIKHTHNWKCPGVDNVQNFWYKQFSATYEMLTEQINKAILEPNRLPKFLTQGITYIKPKNGDTRNPANYRPITCLPTLYKIITATIGKRIEQHLTQNNILTEEQKGCRKQSQGCKEQLIIDSVIMEQTRKEHRNLHTCFIDYKKAFDSVPHSWLTKTLQIYKINPVLRQFLTRTMETWRTNIHLKTQDGHIQTEELLIRRGIFQGDSLSSLWFCLCLNPLSNALNNTNYGFNIRHQKVNQHRINHLYMDDIKLYAATEVQLKELLRITEVCTSDVRMEFGMSKCKVLHINKGQWKNQSEQEILTGETLDNMDKDETYKYLGFNQNIKIDHTQVKTQLTQEFRNRLLKLLKSKLNSKNLTKAINTFAIPVLTYSFGIIKWSHTDIENIHILIRTELTKHRMSHPNACKERLTIDRKQGGRGIIDIQSLHTRQIKTLRDFFQSKQTNLHRSIVKADKNYTPLNLSRTDHSADGHNHIESQQEKINTWSQKALHGKHRYRVTQEHINERQSYTWLQDGQLFPETEGFMLAIQDQVIATRNYMKYIIKDTSITDDNCRKCHQQKETIDHITSGCKTLAGTEYTARHNSAAEVIHQALATTNKLIENTDPYYNYTPTSVLENNEYKLYWDVEIHTDKTIPANRPDIVFQSKADKVTYLIDIAIPNDTNIQNAYAGKISKYTDLAIEIKRLWKQNKVTIVPLIMSVSGLTPNTFTPHLRQLGLDEKLYKIFQKSVILKTCNIVRSFLNSDP

SEQ ID NO: 32412 - protein, 987 aa, Callosobruchus maculatus
MNTQYNKWCGTNPVLRDPLPRLIFKNNTRQILHTINANIIPQFLTNDSDLEDIHTVIYAAAATTLIVNGQKLPKRSKNHTSKRSKPKWQIRIESKISTLRKDLAHVTQYTNNNNLSKRIQTTINRLKSKSPQQTIPEIADTLKQKLAVYAARLRRYNESNDRKDANNLFQKSEKQFYQKMTSNNQITTTEPPSRQELTEFWGSLWSEPKTHNENAPWIRQDEEKHQHIAEQRDVVFTPEEIAETIKHTHNWKCPGVDNVQNFWYKQFSATYEMLTEQINKAILQPNRLPKFLTQGITYIKPKNEDTRNPTNYRPITCLPTLYKIITATIGKRIEQHLTQNNILTEEQKGCRKQSQGCKEQLIIDSVIMEQTRKEHRNLHTCFIDYKKAFDSVPHSWLTKTLQIYKINPVLRQFLTRTMETWRTNIHLKTQDGHIQTLLIRRGIFQGDSLSSLWFCLCLNPLSNALNNTNYGFNIRHQKVNQHRINHLLYMDDIKLYAATEVQLKELLRITEVCTSDVRMEFGMSKCKVLHINKGQWKNQSEQEILTGETLDNMDKDETHKYLGFNQNIKIDHTQVKAQLTQEFRNRLLKLLKSKLNSKNLTKAINTFAIPVLTYSFGIIKWSHTDIENIHILIRTELTKHRMSHPNACKERLTIDRKQGGRGIIDIQSLHIRQIKTLRDFFQSKETKLHRSIVKADKNYTPLNLSRTDHSADGHNHIELQQEKINTWSQKALHGKHRYRVTQEHINERQSYTWLQDGQLFPETEGFMLAMQDQVIATRNYMKYIIKDTSITDDNCRKCHQQKETIDHITSGCKTLAGTEYTARHNSAAKVIHQALATRNKLIENTDPYYNYTPTSVLENNEYKLYWDVEIHTDNTIPANRPDIVFQSKADKVTYLIDIAIPNDTNIQNAYAGKISKYTDLAIEIKRLWKQNKVTIVPLIMSVSGLTPNTFTPHLQQLGLDEKLHKIFQKSVILKTCNIVRSFLNSGP

SEQ ID NO: 32413 - protein, 1206 aa, Callosobruchus maculatus
MDKVSFSNNQRRPRVRRLNSTEPQSQTQQPIAHNPTADVLPVQPATTKAGKPRQRLQWTTEMNKSVMHCYYTATRLETISTGYRHELYRLFTAQYPHLSTRVTEQRLIDQKRVITKNNRLTPQELQAIKSLVSNEINTVTPNDSLADESITERQSNHTGSNQTPNTDTTNNTNIHLDVESEHEHIPDTPDQTSINLPSTATQSQNVTPPPCITQSTEQVMNTQYNKWCGTNPTLRDPLPRPIFKNNTRQILQTVNSNIIPQFLTKDSNLEDIHTVIYAAAATTLIVNGQKLPKRLKDHTSKRSKPKWQIRIENKISTIRKDLAHVTQYIHKNNLSKRIQTTISRLKSRSPQQTISEIYDTLKQKLAVYAARLRRYNESNDRKDTNNLFQKSERQFYQKITSNNQITTIEPPSRKELTDFWGSLWSEPKTHNENASWIRQEEEKQQHIPEQGDVILTPQEIAETIKHTHNWKCPGVDNVQNFWYKQFSATYEMLTDQINKAILQPNRLPKFPTQGVTYIKPKNADTKNPANYRPITCLPTLYKIITATIGKRIEQHLTQNNILTGEQKGCRKQSQGCKEQLIIDSVIMEQTRKEHRNLHTCFIDYKKAFDSVLHSWLTKTLQIYKINPTLRQFLTRIMETWRTNIHLKTQDGHIQTEELYIRRRIFQGDSLSSLWFCLCLNPLSNALNNTNYGFNIRHQKVNQHRISHLLYVDDIKLYTATEVQLKELLKITEVCTSDVWMEFGMSKCKVLHIHKGQWKNHSEQEILTGETLDNMEKDETYKYLGFNQNIKIDHSEAQLTQEFRDRLITLLKTKLNSKNLTKAINTFAIPVLTYSFGIIKWSHTDIENINILIRTELTKHRMSHPKACKERLTIDRKHGGRGIIDIQSLHTRQIKTLRNFFPSKETNLHRSIVKADKNYTPLTLSRPDHPADAHNHIELQQERINTWSRKALHGKHRYRVTQDHINERHSYTWLQDGQLFPETEGFMLAIQDQVIATRNYMKYIIKDTSITDDNCRKCHQQKETIDHITSACKTLAGTEYTARHNSAAKVIHQALATTNKLIENTDPYYNYTPTSVLENNEYKLYWDVEIHTDKTIPANRPDIVFQSKTDKVTYLIDIAIPNDMNIQNTYAGKISKYTDLAIEIKRLWKQNKVTIVPLIMSVSGLTPNTFTPHLQQLGLDERLHKIFQKSVILKTCNIVRSFLNSDP

SEQ ID NO: 32414 - protein, 988 aa, Callosobruchus maculatus
MNTQYNKWCGTNPTLRDPLPRLIFKNNTLQILHTINVNIIPQFLTKDSDLEDIHTVIYAAAATALTLNGQKLPKRSIARTTERSKPKWQIRIENKISTIRKDLAHLAQYTNNNNRSKRVQTTINMLKSKSPQQTIPEIADTLKQKLAVYAARLRRYNESNARKDANDLFQKSEKQFYQKITADNQITAIEPPSKQELTEFWGSLWSEPKTHNENAPWIRQEEEKHQHIVEQEDVILTPEEIAETIKHTHNWKCPGVDNVQNFWYKQFSATYEMLTDQINKAILQPNRLPKFLTQGITYIKPKNADTKNPANYRPITCLPTLYKIITATICRRIEQHLTQNNILTEEQKGCRKQSQGCKEQLIIDSVIMEQTRKEHRNLHTCFIDYKKAFDSVPHSWLAKTLQIYKINPGLREFLASTMETWRTSIHLKAQDGLIKTDELHIRRGIFQGDSLSSLWFCLCLNPLSNALNNTNCGFNIRHDRLNQHKINHLLYMDDIKLYAANEVSKELIRTTEACSSDVRMEFGMSKCKVLHINKGQWKDHPQQETVAGQTLNNMNKDETYKYLGFNQNVKIDHTQVKAQLTQEFRDRLIKLLKTKLNSRNLTKAINTFAIPVLTYSFGIIKWSHTDIENIHILIRTELTKHRMSHPNACKERLTIDRKQGGRGITDIQSLRTRQIKTLRHFFQNKQTNLHRAIVKADKNYTPLNLSCPDHVADTHNPTQSQQEKISTWSQKPLHGKHRYRITQDHINEKQSYTWLQDGQLFPETEGFMFAIQDQVIATRNYKKYVIKDPSITNDNCRKCQQQKETIDHITSACKTLAGTEYTARHNSAAKIIHQALATKNKLIENSDPYYKYTPTSVLENDHYKLYWDVEIHTDKTINANRPDIVFQIKADKVTYLIDIAIPNDVNVQNTYAGKISKYTDLAIEVKRIWKQDKVIIVPFIMSVSGLTPNTFTQHLQQLGLDESLHKIFQKSVILKTCNIVRSFLNSDQ

SEQ ID NO: 32415 - protein, 1207 aa, Callosobruchus maculatus
MDRVNFMNNQRRPRVRRLNSPEPQTQTEQPIEHNPAADVLPTQPATTKAGKPRQRLQWTTEMNKSVMRCYYTATKLETISTGYRHELHRLFTTQYPHLSTRVTEQRLIDQKRVITKNNRLTPQELQDIKNLVSNEMNIVQPNDSLTTEQIVETQNGDTQTSQTSNTAKTNNTSIHSQLGPEYDQALDTPDTTITNLPSTIIQIQNITRPFAVTQSVEQVMSTQYNKWCGTNPALRDPLPRLIFKNNTQQILHTVNANVISQFIRDDSNLEDIHTVIYAAAATTLIVNGQKLSKRSKHQTSNRTKPKWQIRIENKISTIRKDLAHLAQYTINNNHPSRHIQRTINILKSKSPQQTIPEITDTLKQKLAVYAARLRRYNESNARKDANSLFQKSEKQFYQKITADNQITTIEPPSKQELTEFWGSLWSEPKTHNEDAPWIREEEEKHQHIAEQGDVILSKEEIVETIKHTHDWKCPGVDNVQNFWYKHFSSTYEVLTNQINKAIRQPDRLPKFLTQGITYIKPKNADTKNPANYRPITCLPTLYKIITATLCRRIEQHLTQNNILTEEQKGCRKQSQGCKEQLIIDSVIMEQTRKEHRNLHTCFIDYKKAFDSVPHSWLTKILQIYKINPGLRQFLAKTMKTWRTNIHLTTQDGHIQTEELHIRRGIFQGDSLSSLWFCLCLNPLSNALNNTNHGFNIRHQKVNQHRINHLLYMDDIKLYAATDVQLRELLRITEVYTSDVRMEFGMNKCKVLHINKGQWKNHPEQEIVTGQTLDNMDKEETYKYLGFNQSVKIDHTQIKAELRQVFRDRLIKLLKTKLNSRNLTKAINTFTIPILTYSFGIIKWSYTDIENIHRQTELTKHRMSHPNACKERLTIDRTQGGRGITDIQSLRTRQIKTLRHFFQNKQTNLHRAIVKADKNYTPLNLSCPDHVADTHNPTQSQQEKISTWSQKPLHGKHRYRVTQDHINKKQSYTWLQDGQLFPETEGFMLAIQDQVIATRNYKKYIIKDPSITDDNCRKCQQQKETIDHITSGCKTLAGTEYTSRHNSAVKVIHQALATTNKLIENTDPYYNYTPTSVLENDQYKLYWDVQIHTDKTIPANRPDIVFQSKLDEVTYLIDIAIPNDVNIQNTYAGKISKYTDLAMEIKRLWKQDKVTIVPLIMSVSGLTPNTFTPHLQQLGLDEKLHKTFQKSVILKTCNIVRSFLNSDQ

SEQ ID NO: 32416 - protein, 1387 aa, Pachyrhynchus sulphureomaculatus
MLNNNNYNNENGRVLRRRTPVVQTATATPQQQLQTNQTTASVETTPDSFTRSDIVGDGNCLFRAVSLYLYGHQNHHEKLREVALRYLQQNWSELHTFSLIEVDDIKDFNNYYNYMRKNGTYGTSLEILALSETQNSNFHIFSKQRRTRHTKITFTDRPTIISTGKYNKTIYLLLTGNPMSGHFELLTPQNTENIPENNRPIKEASGERRNGRGRRGKWQLDQNDEDQATENGPAKSVVLATKPTPTKAGKSQQRMSCTTGINEHAMRCCNENTKPDKEITEKRITRRLDPPTSIPSATDVDTGQTQPPNPGQGPCVLQGQHATTKAGKPRQRLKWTDEMNRTVMRCYYTATKLETITSGYRQQLHRLFLTEYPHLQLLVSEQRVVDQKRVITKNNRLTPLELQTIKDTVAVELNTDQPNNRNNKADSEPASHTQPPSRTQQYPPPRRSITQNNIASTAQHHITDNNMNHSPPSTTSTQHHPESPLIQTLKAKMESHLARWSGTDPTTRNPIPRLIFRQSTQPILNTLNKHIIPQYITDSSTIEDIHTIIYAAAITTLTQNNQKLPQRQGNPNRTKPKFKWQIRIENKINNIRRDLGHLTQFISGNASKRVTQGANKIKSKSPNRTLPEILDTLKQKLSVYAARLRRYKESNERKDTNNLFRRSEKQFYRKTMYNKQIAVTEPPNKQELTDYWKSIWSEPKQHNNNTPWIKAEEDKHKHVTEQENTTFNTQEITETIKHTHNWKCPGIDNIQNFWYKQFTTTHEALTHQINKAILQPHTFPTFLTQGITYVKPKSSDTTNPSNYRPITCLPTLYKIITATISKKIEQHLTDNNILTEEQKGCRKNSRGCKEQLIIDSVIMGQTRKEHRNLHIGYIDYKKAFDSIPHSWLIRALEIYKINQHLRQFLAQIMKTWKTKIRLETQTERIQTEELYIRRGIFQGDSLSALWFCLCLNPLSNILNRTEHGFNIRHQKENQHKINHLLYMDDIKLYAATQTQLKELLKITEIFTLDVNMEFGISKCKVLHINKGQWKHHHETETINNETLDNMFDKETYKYLGFQQSTKLNHTHIKTELRTEFKNRLTKLLQTKLNSKNLTKAINTFAIPILTYSFGIIKWSQTDIENIHILIRSQFTKYRKLHPNACKERLTIERKAGGRGIIDIRSLHTKQIQTLRKFFHSKQTSLHTATVKADKNYTPLDLARADHSADTHSHTQLQQEKMKTWSEKTLHGKHRYHIEQDHVNKKQSYTWLRDGQLFPETEGFLLAIQDKVILTRNYQKHIIKDPTIAEDRCRKCHQQKETIEHITSGCKILAGTEYTARHDSAAKVVHQALATTYRLIENTDPYYKYTPTSILENEDYKLYWISVSIQIKQSPPIDPILLFSAKKEKSPI

SEQ ID NO: 32417 - protein, 906 aa, Pachyrhynchus sulphureomaculatus
MNHSPPSTTSTQHHPESPLKQTLKAKMESHLARWSGTDPTTRNPIPRLIFRQSTQPILNTLNKHIIPQYITDLSTIEDIHTIIYAAAITTLTQNNQKLPQRQGNPNRTKPKFKWQIRIENKINNIRRDLGHLTQFISGNASKRVTQGANKIKSKSPNRTLPEILDTLKQKLSVYAARLRRYKESNERKDTNNLFRRSEKQFYRKTMYNKQITVTEPPNKQELTDYWKSIWSEPKQHNNNTPWIKAEEDKHKHVTEQENTTFNTQEITETIKDTHNWKCPGIDNIQNFWYKQFTTTHEALTHQINKAILQPHTFPTFLTQGITYVKPKSSDTTNPSNYRPITCLPTLYKIITATKSKKIEQHLTDNNILTEEQRGCRKNSRGCKEQLIIDSVIMGQTRKEHRNLHIGYIDYKKAFDSIPHSWLIRALEIYKINPHLRQFLAQIMKTWKTKIRLETQIERIQTEELYIRRGIFQGDSLSALWFCLCLNPLSNILNRTEHGFNIRHQKENQHKINHLLYMDDIKLYAATQTQLKELLKITEIFTLDVNMEFGISKCKVLHINKGQWKHHHETETINNETLDNMFDKETYKYLGFQQSTTLNHTHIKTELRTEFKNRLTKLLQTKLNSKNLTKAINTFAIPILTYSFGIIKWSQTDIENIHILIRSQFTKYRKLHPNACKERLTIERKAGGRGIIDIRSLNTKQIQTLRKFFHSKQTSLHTATVKADKNSTPLDLARADHSADTHSHTQLQQEKMKTWSEKTLHGKHRYHIEQDHVNKKQSYTWLRDGQLFPETEGFLLAIQDKVILTRNYQKHIIKDPTIAEDRCRKCHQQKETIEHITSGCKILAGTEYTARHDSAAKVVHQALATTYRLIENTDPYYKYTPTSILENEDYKLYWDIGIHTDKNSLRQ

SEQ ID NO: 32418 - protein, 1499 aa, Pachyrhynchus sulphureomaculatus
MLNNNNYNNENGRVLRRRTPVVQTATATPQQQLQTNQTTASVETTPDSFTRSDIVGDGNCLFRAVSLYLYGHQNHHEKLREVALRYLQQNWSELHTFSLIEVDDIKDFNNYYNYMRKNGTYGTSLEILALSETQNSNFHIFSKQRRTRHTKITFTDRPTIISTGKYNKTIYLLLTGNPMSGHFELLTPQNTENIPENNRPIKEASGERRNGRGRRGKWQLDQNDENQATENGPAKSVVLATKPTPTKAGKSQQRMSCTTGINEHAMRCCNENTKPDKEITEKRITRRLDPPTSIPSATDVDTGQTQPPKPGQGPYVLQGQHATTKAGKPRQRLKWTDEMNRTVMRCYYTATKLETITSGYRQQLHRLFLTEYPHLQLLVSEQRVVDQKRVITKNNRLTPLELQTIKDTVAVELNTDQPNNRNNKADSEPASHTQPPSRTQQYPPPRRSITQNNIASTAQHHITDNNMNHSPPSTTSTQHHPESPLIQTLKAKMESHLARWSGTDPTTRNPIPRLIFRQSTQPILNTLNKHIIPQYITDSSTIEDIHTIIYAAAITTLTQNNQKLPQRQGNPNRTKPKFKWQIRIENKINNIRRDLGHLTQFISGNASKRVTQGANKIKSKSPNRTLPEILDTLKQKLSVYAARLRRYKESNERKDTNNLFRRSEKQFYRKTMYNKQIAVTEPPNKQELTDYWKSIWSEPKQHNNNTPWIKAEEDKHKHVTEQENTTFNTQEITETIKHTHNWKCPGVDNIQNFWYKQFTTTHEALTHQINKAILQPHTFPTFLTQGITYVKPKSSDTTNPSNYRPITCLPTLYKIITATISKKIEQHLTDNNILTEEQKGCRKNSRGCKEQLIIDSVIMGQTRKEHRNLHIGYIDYKKAFDSIPHSWLIRALEIYKINQHLRQFLAQIMKIWKTKIRLETQTERIQTEELYIRRGIFQGDSLSALWFCLCLNPLSNILNRTEHGFNIRHQKENQHKINHLLYMDDIKLYAATQTQLKELLKITEIFTLDVNMEFGISKCKVLHINKGQWKHHHETETINNETLDNIFDKETYKYLGFQQSTKLNYTHIKTELRTEFKNRLTKLLQTKLNSKNLTKAINTFAIPILTYSFGIIKWSQTDIENIHILIRSQFTKYRKLHPNACKERLTIERKAGGRGIIDIRSLHTKQIQTLRKFFHSKQTSLHTATVKADKNYTPLDLARADHSADTHSHTQLQQEKMKTWSEKTLHGKHRYYIEQDHVNKKQSYTWLRDGQLFPETEGFLLAIQDKVILTRNYQKHIIKDPTIAEDRCRKCHQQKETIEHITSGCKILAGTEYTARHDSAAKVVHQALATTYRLIENTDPYYKYTPTSILENEDYRLYWDIGIHTDKTVSANRPDITFQCKKGKVTYLIDIAVPNDTNIQAKYTEKISKYTDLATEIKRLWRQEKVIIVPLIISATGLTPITFTPHLVQLGLNTDIHRNIQKSVILKKHVTLSGHSLIRNGNSVCADLVLARQPNMEPH

SEQ ID NO: 32419 - protein, 1389 aa, Pachyrhynchus sulphureomaculatus
MLNNNNYNNENGRVLRRRTPVVQTATATPQQQQLQTNQTTASVETTPDSFTRSDIVGDGNCLFRAVSLHLYGHQNHHEKLREVALRYLQQNWSELHTFSLIEVDDIKDFNNYYNYMRKNGTYGTSLEILALSETQNSNFHIFSKQRRTRHTKITFTDRPTIISTGEYNKTIYLLLIGNPMSGHFELLTPQNIENIPENNRPIKEASGERRNGRGRRGKWQLDQNDEDQATENGPAKSVVSATKPTPTKAGKSQQRMSCTTGINEHAMRCCNENTKPDKEITEKRITCRLDPPTSIPSATDVDTGQTQPPKPGQGPYVLQGQHATTKAGKPRQRLNWTDEINRTVMRCYYTATKLETITSGYRPELHRLFLTEYPHLQLLVSEQRVIDQKRVITKNNRLTPLELQTIKDTVAVELNTDQPNNRNNKADSEPASHTQPPSRTQEDPPPRRSITQNNIASTAQHHITENNMNHSPPSTTSTQHHHESPLIQTLKAKMESHLARWSGTDPTTRNPIPRLIFRQSTQPIINTLNKHIIPQYITDLSTIEDIHTIIYAAAITTLTQNNQKLPQRQGNPNRTKPKFKWQIRIENKINNIRRDLGHLTQFISGNASKRVTQGANKIKSKSPNRTLPEILDTLKQKLSVYAARLRRYKESNERKDTNNLFRRSEKQFYWKTMYNKQIAVTEPPNKQELTDYWKSIWSEPKLHNNNTPWIKAEEDKHKQVTEQENTTLNTQEITETIKHTHNWKCPGIDNIQNFWYKQFTTTHEALIHQINKAILQPHTFPTFLTQGITYVKPKNSDTTNSSNYRPITCLPTLYKIITATISKKIEQHLTDNNILTEEQKGCRKNSRGCKEQLIIDSVIMGQTRKEHRNLHIGYIDYKKAFDSIPHSWLIRALEIYKINQHLRQFLAQIMKTWKTKIRRETQTERIQTEELYIRRGIFQGDSLSALWFCLCLNPLSNILNRTEHGFNIRHQKVNQHKINHLLYMDDIKLYAATQTQLKELLKITEIFTLDVNMEFGISKCKVLHINKGQWKCHQETETINNETLDNMFDKETYKYLGFQQSTKLNHTHIKTELRTEFKNRLTKLLQTKLNSKNLTKAINTFAIPILTYSFGIIKWSQTDIENIHILIRSQFTKYRKLHPNACKERLTIERKAGGRGIIDIRSLHTKQIQTLRKFFHSKQTSLHTATVKADKNYTPLDLSRADHSADTHSHTQLQQEKMKTWSEEALHGKHRYHIEQDHVNKKQSYTWLQDGQLFPETEGFLLAIQDKVILTRNYQKHIIKDPTIAEDRCRKCHQQKETIEHITSGCKILAGTEYTARHDSAAKVVHQALATTYKLIENTDPYYKYTPTSILENEEYKLYWDIGIHTDKTVSANRPDITFQCKKKEKSPI

SEQ ID NO: 32420 - protein, 952 aa, Ampulex compressa
MHKNMYDEQMVRKIVNIKAPWTSEELSLLARQEAALTLNHTRFMNQALAPFFPNRTLESIKGQRRGFTYKEQVARRIREMQEGDDLPSISEESSQEVSEFASQILAHHQQFPLPKESGYSAEKLERICGNVTVWSLDTILEELQAYLLEIFPIPTRMRKPARSRSTEMTKRKARRAEYAKTQRSWKRHPCKCLRTLLKDKTSSSVPSMDQMVSFWKTVMTGEANQSPGVGKQHRHQPDLWKPVTPQEIIKAFPDMTSAPGPDGITVRQFKAVPRAIIARIFNLIMLCGRLPKHLRVSRTTMIPKKDGVTEPGDYRPITVSSVIVRTLHKVLTLRLSQSLGLDARQRAFVPVDGTAMNIFDLDLILKYHRQNYKQVYLASMDIAKAFDSVTHGTISDTLKTFGVPIGMVQYIMETYRTGTTRIACDEWVSEEIKPARGVKQGDPLSPIIFNMVIDRLICKIPGEIGVEVDGQRYNVLAFADDLVFVASTPNGLQATIDIASEYLAKCGLRVNAGKSFTIAIRNVPHIKKSVVDAGLRFSCQGIELPSYSREHEWTYLGVKFTPEGSFSPKDQKQLEKQLQKLAKAPLKPQQRMFAVRVMVLPSLYHTLVLGNTALSTLKKIDAMLRRAVRKWLDLPQDVPNAYIHSNAKDGGLSIPSVRWLVPFWRRERLRKKIEATTGPASFLRMEVQKATRRLIGNGGEMKSAQNIEQHWAKILHNHFDGIALKEARKVPQQNQWIVDGTQLLSGRDYLNLVKFRINAMPTRSRLARGRVRDRGCRAGCTQTETLNHIVQQCQRTHGARIARHDAVVKYLQRNLIRAYDTVEEEPKFQTTDGLRKPDIIAVKHRKAILIDVQVVGEQRDLATAHQQKVDYYQPLCEAIKSRYSVEEVQVTSATISCRGIWSAKSAKQLLSLKVLQRKELKILSTRALIGGINSFRIFNKMTSRIHHRTGIG

SEQ ID NO: 32421 - protein, 1106 aa, Listronotus oregonensis
MKWTNEINQQIMRSYFRSTALETDMTLYRTRMHADFINSMPNLRHLTEQRIADQKRVILKNNLLPPPTIETIKQEIRAEMNHNPQPETNQTPSTPRPRRRTSEIIPTENEVIWSRNFQKHLTEYRGTDPCLRPLLPKLNHKPNSKTLIKIANQNLQQYLNNEADLEEIHLLIYCAALTTIKANNQSLPNTLLKKQTEYKPHWQRRLEQKISELRQNIGRVQQMERGQRTKKLLKRVPKELLENIKNKKSNEQERIITDHLDTLKQKLAAVSKRHRRYLTSYQRKLQNINFLKNQRRFYRNLGQNNKNENNSKPPPKETVEAFWKNIWSVKGQYNKEAEWIIQEEETNRNKLREPEHNAEIIAEDFQTVIRKLPNWKAPGRDKLHNFWFKKFTSTHTWLLKQINNVIQNPEQLPRFLTNGITYLLPKSEDTEDPSQYRPITCLPTLYKIITALISNKLYQYLEKNNILTEEQKGCRRHFMGCKEQITIDAVILENTRRKNRNLNMAYVDYQKAFDSIPHDWLLKTLEIYKVDPILANFLKHAMKHWNTKISIDTSNEKLETKPIRIERGIFQGDSLSALWFCLALNPISNALNRTGYGVTLKSENIKKVISHLFFMDDLKVYTSNAKQLELVLKLVHQWSTDIGMAFGVKKCQTVSIQKGKIKKTTPIQLDPKTVIASMAKEPYKYLGVLQTNQIEHTTMKTILTKEFLSRLRKLLKCKLNSINLTTAINSYAISTLQYSFGIVKWTHTDLDNINRMIRTEMTKYRAHHPKSAVERITLSREKGGRGIKDVISACNQQILGLRKFFYHKNTHLHKVTVENDLEYTPLNLKEPNYGGLQNKTENDKLNSWGSKELHGRFYYELQNPNVDKTASLEWLRLGALYPETEGFMIGIQDQVINTRSYRMHIIKDDVVTDRCRKCSNNQETIEHIISSCPQLAQTKYLTRHNKVATILYQEILKSLKIPPENEEPYYKYNPPPVVENDAYRIYWDKGIITDVTIQHNRPDIIVVNKNAKTVLLIDVSIPSNNNIHTKHNEKIEKYKELKREIKTMWKLTDATVVPVVISAMGLVPVKLKESLNKIGVPYNTFRTMQKSVILDTCAIVRSFLEQ

SEQ ID NO: 32422 - protein, 913 aa, Riptortus pedestris
MPGRTCRAIERARAKVEYFEIYQGLSQPEELEGETRERPPSEVGNLDRGAFILILEGIAERLVGMGPVYGSAVLAHVLRQCIAGEDVAGSLGQWIGLHLAGKDEPPRRGCQDSVNPVGREYGPRRRNPRRVDYARIQNLWNKDKKAAVAEILGEAKPGGTHGVGELEAYWAPIMEERSSPWTAPRVEGPRINDASSIWTPITPEEAARHMPERESATGLDGVSAEKWRAVPGVLREAVLNCIMAIGKVPCGQLRARVTMIPKSDSPVSPGDYRPIAVASVIVRHLHRILAFRLASIVQHVPEQKGFLSGIDGVACNVFLLDSVLRNAWRKKRNICLAVLDVKKAFDSISRHAILAVARARGLPEGFVRYLDGIYAGSVSVIYAGGRCSRDILPGRGVRQGDPLSPILFNMVIDHVIEASRTRVGFLLGTVRLSFIAYADDLILLASSEEGLNVSLRRLECALRDCGLELNPGKCVGLELRSSGQRRVVKVCPASGLRVSEQPVRALGVEDVWVYLVPFSHRGAEPFVPNWMDVMSKIDRAPLKPQQKMEALRTYVLPRWFHGLVLGKPNPVELHRMDVGIRAFVRKWLHLPPDSLMHLFMLVGGMVGLEYRRSLQIYPFLRAKRLGFAGHLLGERGATREVRQGLGGGLVPPENVLDVNVSCMNELYARVDCKDLSECRKVTASTAWMGSRAAELSGKQFVAFSRIVGGAIPTRMRTSRGQPERRRSATCRAGCDSLETMAHIMSICPYTRRLRIYRHDEIVRFVRRGFIMRGWHTWHENVFITPQGKFRPDLVVEYKGKAAIIDVHVVTAAGPLEDSFFRKKSKYDQLELKTAVAKLADVEPGLVRVLPVTLSYKGVWCKKSADGLRELGVSQATLEWITIKVLSGTWFVWAKFSTFPRGFRAAGRPREGVG

SEQ ID NO: 32423 - protein, 993 aa, Riptortus pedestris
MDSDRQSYKCEYCERWFTTKRGRGRHMKCTHPREFNDAIVLGSVRARWGTEQLLVLALHERRLRQEGYAGTLNERLAELMPGRTCRAIERARAKVEYFEVYQGLSQPEELEGETRERPPSEVGNLDRGAFILVLEGIAERLVGMGPVYGPAVLAHVLRQCIAGEDVAGSLGQWIGLHLAGKDEPPRRGCQDSVNPVGREYGPRRRNPRRVDYARIQNLWNKDKKAAVAEILGEAKPGGTHGVGELEAYWAPIMEERSSPWTAPRVEGPRINDASSIWTPITPEEAARHMPERDSATGLDGVSAEKWRAVPGVLREAVLNCIMAIGKVPCGQLRARVTMIPKSDSPVSPGDYRPIAVASVIVRHLHRILAFRLASIVQHVPEQKGFLSGIDGAACNVFLLDSVLRNAWRKKRNICLAVLDVKKAFDSISRHAILAVARARGLPEGFVRYLDGIYAGSVSVIYAGGRCSRDILPGRGVRQGDPLSPILFNMVIDHVIEASRTRVGFLLGTVRLSFIAYADDLILLASSEEGLNVSLRRLECALRDCGLELNPGKCVGLELRSSGQRRVVKVCPASGLRVSEQPVRALGVEDVWVYLGVPFSHRGAEPFVPNWMDVMSKIDRAPLKPQQKMEALRTYVLTRWFHGLVLGKPNPVELRRMDVGIRAFVRKWLHLPRDSCNAFIHAGRRNGGTGVPSFASNIPFLRAKRLGFAGHLLGERGATREVRQGLGGGLVPPENVLDVNVSCMNELYARVDCKDLSECRKVTASTAWMGSRAAELSGKQFVAFSRIVGGAIPTRMRTSRGQPERRRNATCRAGCDSLETMAHIMSICPYTRRLRIYRHDEIVRFVRRGFIMRGWHTWHENVFITPQGKFRPDLVVEYKGKAAIIDVHVVTAAGPLEDSFFMKKSKYDQLELKAAVAKLADVEPGMVRVLPVTLSYKGVWCKKSADGLRELGVSQATLQWITIKVLSGTWFVWAKFSTFPRGFRAAGRPREGVG

SEQ ID NO: 32424 - protein, 914 aa, Riptortus pedestris
MPGRTCRAIERARAKVEYFEIYQGLSQPEELEGETRERPPSEVGNLDRGAFILILEGIAERLVGMGPVYGPAVLAHVLRQCIAGEDVAGSLGQWIGLHLAGKDEPPRRGCQDSVNPVGREYGPRRRNPRRVDYARIQNLWNKDKKAAVAEILGEAKPGGTHGVGELEAYWAPIMEERSSPWTAPRVEGPRINDASSIWTPITPEEAARHMPERESATGLDGVSAEKWRAVPGVLREAVLNCIMAIGKVPCGQLRARVTMIPKSDSPVSPGDYRPIAVASVIVRHLHRILAFRLASIVQHVPEQKGFLSGIDGVACNVFLLDSVLRNAWRKKRNICLAVLDVKKAFDSISRHAILAVARARGLPEGFVRYLDGIYAGSVSVIYAGGRCSRDILPGRGVRQGDPLSPILFNMVIDHVIEASRTRVGFLLGTVRLSFIAYADDLILLASSEEGLNVSLRRLECALRDCGLELNPGKCVGLELRSSGQRRVVKVCPASGLRVSEQPVRALGVEDVWVYLGVPFSHRGAEPFVPNWMDVMSKIDRAPLKPQQKMEALRTYVLPRWFHGLVLGKPNPVELRRMDVGIRAFVRKWLHLPRDSCNAFIHAGRRNGGTGVPSFASNIPFLRAKRLGFAGHLLGERGATREVRQGLGGGLVPPENVLDVNVSCMNELYARVDCKDLSECRKVTASTAWMGSRAAELSGKQFVAFSRIVGGAIPTRMRTSRGQPERRRSATCRAGCDSLETMAHIMSICPYTRRLRIYRHDEIVRFVRRGFIMRGWHTWHENVFITPQGKFRPDLVVEYKGKAAIIDVHVVTAAGPLEDSFFRKKSKYDQLELKTAVAKLADVEPGLVRVLPVTLSYKGVWCKKSADGLRELGVSQATLEWITIKVLSGTWFVWAKFSTFPRGFRAAGRPREGVG

SEQ ID NO: 32425 - protein, 993 aa, Riptortus pedestris
MDSDRQSYKCEYCERWFTTKSGRGRHMKCTHPREFNDAIVLGSVRARWGTEQLLVLALHERRLRQEGYAGTLNERLAELMPGRTCRAIERARAKVEYFEVYQGLSQPEELEGETRERPPSEVGNLDRGAFILVLEGIAERLVGMGPVYGPAVLAHVLRQCIAGEDVAGSLGQWIGLHLAGKDEPPRRGCQDSVNPVGREYGPRRRNPRRVDYARIQNLWNKDKKAAVAEILGEAKPGGTHGVGELEAYWAPIMEERSSPWTAPRVEGPRINDASSIWTPITPEEAARHMPERDSATGLDGVSAEKWRAVPGVLREAVLNCIMAIGKVPCGQLRARVTMIPKSDSPVSPGDYRPIAVASVIVRHLHRILAFRLASIVQHVPEQKGFLSGIDGVACNVFLLDSVLRNAWRKKRNICLAVLDVKKAFDSISRHAILAVARARGLPEGFVRYLDGIYAGSVSVIYAGGRCSRDILPGRGVRQGDPLSPILFNMVIDHVIEASRTRVGFLLGTVRLSFIAYADDLILLASSEEGLNVSLRRLECALRDCGLELNPGKCVGLELRSSGQRRVVKVCPASGLRISEQPVRALGVEDVWVYLGVPFSHRGAEPFVPNWMDVMSKIDRAPLKPQQKMEALRTYVLPRWFHGLVLGKPNPVELRRMDVGIRAFVRKWLHLPRDSCNAFIHAGRRNGGTGVPSFASNIPFLRAKRLGFAGHLLGERGATREVRQGLGGGLVPPENVLDVNVSCMNELYARVDCKDLSECRKVTASTAWMGSRAAELSGKQFVAFSRIVGGAIPTRMRTSRGQPERRRNATCRAGCDSLETMAHIMSICPYTRRLRIYRHDEIVRFVRRGFIMRGWHTWHENVFIIPQGKFRPDLVVEYKGKAAIIDVHVVTAAGPLEDSFFRKKSKYDQLELKAAVAKLADVEPGMVRVLPVTLSYKGVWCKKSADGLRELGVSQATLQWITIKVLSGTWFVWAKFSTFPRGFRAAGRPREGVG

SEQ ID NO: 32426 - protein, 1241 aa, Amphibalanus amphitrite
MTRRLTSKHVTYPCGACSRGVGSGSVQCHQCSRWFHGRCAVLNRSNLLRLAKLHTEWRCTTCQNTPVAQPCDPQRPTSNGENSPQPPRDASTPASSRSPTPTSQPARDASPPASSPSPTPTSQPARDASPPASSPSPTPTSQPARDASPPASSPSLVPVSQPPHDARDQPSTQSPAECVACSIRSRRKTTITCGSCRQLWHTSCAKVPARKSHHLPVWHCPACLGRESAQLSDAFNGREVPDTGVVEGLATLRRSTKLISRIPKGVRPLVADALCSALEDALKLRTICAWWTFLSFAFFALRTPGKGDNNVSAAASIRQQLSSPNQTMTPNLLPEPPTNDSAREHQKPATDALARRILGKCADGDIRAALRLLTSDDTVAEPDAEVIAELMLKHPAAPKDELLPPPPAPSDPGPLTVTPEEVEAAINSMPPGSSAGLDGIRPLHLRQLISREAAESGRRLLHSLTVLTNLVLAGEVPDCARDALFSASLCALRKKSGGLRPIAVGSVYRRLPSRIGARFVADSLGAELRPVQLGVGTSLGCEAAVHATRSFIEASRQSAAPHVLVKLDASNAFNTVRRDVFLTRIRERCPEVYYLAYQAYSSPSPLIIGGQTIASACGVQQGDPLGPAAFAIAIDSCARAVSAPLNIWYLDDATLASPASAVAADIATLPTALAAAGLSLNAAKCEVAFIGAEDSDHRHAAISAICSALPDVKETELTNLSLLGSPLTDGSIGAAGEAASAMVQRLCTRLRELDSHTAVFFLAHHVSAPRLTYLLRSAPAFKAPHVLQATDEMVRSTLEAVCNVAINPAAWEQASLPVKFGGLGIRSVEALALPAYIASVNAARPLIRSICPSVTDELSDTLETAVSAFLHRTGVDRQQLPDGELVSSQRAWDTVACTVVQSRLLVPANQIDRARLIAAGQPHTAAWIQAVPVPSLGLHLDDETVRVAVALRLGAPVCEPHRCRLCARPVTPLGHHGLSCQKSAGRHSRHAHLNDVVRRALSGAGFPAILEPVGLDRGDGRRPDGITVFPFREGKCLTWDTTCVDTFADHIAVESALKPGAAARQAEERKRQRYADLARRYSFVPVALETTGVYGPAAAAFVQDLGRRLATCTGERRETEWLRQRLSVAIARGNAASVLATAPQSGIEQAGQTRRAASTAGSNPGTTRRWPRSHAVTAATPSASCAPEVETSGKRSTRATPPKADSPTEINLGNSCYRRGLVNLGNTCFMNTVLQALFHSE

SEQ ID NO: 32427 - protein, 1101 aa, Amphibalanus amphitrite
MTPNLLPEPPTNDSAREHQKPATDALARRILGKCADGDIRAALRLLTSDDTVAEPDAEVIAELMLKHPAAPKDELLPPPPAPSDPGPLTVTPEEVEAAINSMPPGSSAGLDGIRPLHLRQLISREAAESGRRLLHSLTVLTNLVLAGEVPDCARDALFSASLCALRKKSGGLRPIAVGSVYRRLPSRIGARFVADSLGAELRPVQLGVGTPLGCEAAVHATRSFIEASRQSAAPHVLVKLDVSNAFNTVRRDVFLTRIRERCPEVYYLAYQAYSSPSPLIIGGQTIASACGVQQGDPLGPAAFAIAIDSCARAVSAPLNIWYLDDATLAGPASAVAADIATLPTALAAAGLSLNAAKCEVAFIGAEDSDHRDAAISAICSALPDVKETELTNLSLLGSPLTDGSIGAAGEAASAMVQRLCTRLRELDSHTAVFFLAHHVSAPRLTYLLRSAPAFKAPHVLQATDEMVRSTLEAVCNVAINPAAWEQASLPVKFGGLGIRSVEALALPAYIASVNAARPLIRSICPSVTDELSDTLETAVSAFLHRTGVDRQQLPDGELVSSQRAWDTVACTVVQSRLLVPANQIDRARLIAAGQPHTAAWIQAVPVPSLGLHLDDETVRVAVALRLGAPVCEPHRCRLCARPVTPLGHHGLSCQKSAGRHSRHAHLNDVVRRALSGAGFPAILEPVGLDRGDGRRPDGITVFPFREGKCLTWDATCVDTFADHIAVESALKPGAAARQAEERKRQRYADLARRYSFVPLALETTGVYGPAAAAFVQDLGRRLATCTGERRETEWLRQRLSVAIARGNAASVLATAPQSGIEQAGQTRRAASTAGSNPGTTRRWPRSHAVTAATPSRNPLDDPELAQYLKPRAAPRSVDESVATTQELTDQLLSIAPSCSGVSPGSPRPNRLATYASLLAEMKRDAVSGSQSELSLPRIPGTSRRARQKPAAGGDRSRSRGVSLPPAVPTSRSRASLRRQSSTGARGRRRTAADREEEDRREEEDREREEDRREEEDREREEERREEEEEDGESLRPSLEGRPALQDGSAGSPRLFHQVAEGLPVGQARPRPLGRCPLRPQGLPGGPPPGQRAGAAPMAGLR

SEQ ID NO: 32428 - protein, 1532 aa, Amphibalanus amphitrite
MDIDSDSSIEGYDPSSGKWVTANSKKIPKRIKDISVGPTHNSCRKPVPVPVTSKSDQATTISLNSSIRPTCPLCGKTGTRKRYMQCAICSRHWHMSCVRLNRAQANALHRWWCPDCVKASSETPSSPEPGPSLPSTLTAPQQPEPDVDLGLTLAGLRRSRPVVRRIPKGARISAADALATLIEKAVISSEVGPWSKLMRFPYEALSAREGANKSSLTAKIKRQIFAYIDDRTDPSATDPHHYDETTLNAPKTVAKNRTKKDRSSGKWKKTVESKLSDGDVKGALRLLSSADAVAQDTSKTIDALRAKHPPAPEDICLPSPPDDTTQPLLASCAEVQAAVKSFNTSSSAGLDGLSPSHLQDLTGYTCGEAGRRLITALTRLVNLALSGDIPPAAREVFFTASLLALEKPCGGIRPIAIGSSYRRLATKVAIRPLCSELGEKLRPVQLGFGTTGGCEAAAHATRHFVKLLSEEDVVVKIDMQNAFNSIRRDHFLAVVRDSAPSLYPLLWQAYSSPTPLFHGTAKIMSAAGVQQGDPSGPAVFALATHSIVSSATCSMNTWFLDDGTLGGNRADVYSDLKKLIPAMARVGLQVNPSKCQIIVPTVDNKGETISQLHHIIPGASVLSEDEQTVLGAPLTAAAAELSAQDKREDLVRMVGRLKRLDAHSALYLLRNSLWLPKLQYLLRAAPFFQHSALLKQLDEVIRAAMEELVNVRFSDMNWEQAVLPTGLGGLGLRRTEEVALPSFIASLHRCQQLLHTILPASFADKILNELKQAEEEWLVKAGGKMAPADDTRDRQKSWDAPIAEHQRDRLLLEANQFDRARILGAATPESGAWLRALPSSSLGTHLDNETVRIAVALRVGADVCSGVHACRCGSPADVKGHHALTCQFSAGRLPRHTALNDIVRRALSTAGIPAQLEPYGVDRGDGKRPDGMTIYPFSHGRCLVWDATCVNTFADSRLGGAALKSAAAAKKAEDEKRRKYAQLTQRFRFEPVAFETGGACGPTTKAFLQELGAKMAAVTGDQREMEWLWQRLSIAIVRGNAASVLLECATDPSQQHLSAERPNRVSAEQQLATAAGSRRSGCSGGSRLVASQQRWSPPSPKKLEEESRALQLHGGKAHTARELQLTPAADPDKHGNDPLYTGLPNYGNSCYQNATMYVVSHRSLPGNPSEDGGGTGSQSDGRPLGLTGLRNTGNTCFLNTVVQCLSNTRALHDYILRDGRSSDASMPAAATKGSLMNTFCALIRDMWTSSDETERVLTTAPLKSMIQRLAPRFMGSQQQDAQEFLRYLLEGLHEDVNRVTSRPKPITTDIDDSMSASQKSMEAWKRFLRLENSKFVDLFVGQLKATLRCTVCGHESVTFDPFWDLSLPIPSRSGQVRLQACFDLFTKEEVLDGDEKPTCSKCQKRQKCTRSLSIQKFPRILVVHLKRFSPQERFGGKLNTTVDLSMNGLDLSPYSAGQTPCRYSLYGVANHSGTLLSGHYTAYCRHPYTAEWYEYNDSRVHVMDQRNVNSGKAYVLFFELAGSKHRSGSTHV

SEQ ID NO: 32429 - protein, 1093 aa, Oedothorax gibbosus
MLPLAFPQFRPLCFHLGPPPFPPWPPRCGPAVGLTPPLPAGPPPLWMPPPAFPRPAPGHAALPPPDEAILAMGPPCGQGNLPMLGDCDDGPSLIGDLAPIGPGPVAPPPSSPGDDPPGEPTDDVDWDDGVPPAIFPDDRLLFLGDARPSFFQQKWIDIFINISSIEALDDQITIYTAELQQALRRPARRGRRRRPPITAAVPPILADALGRQGAQSSTFFNNGLSMYDKEAATKLQRDFNLMPGRTVDAVLHGGREPCPIPAERLVAHFGEVYSSRPHSHEFVFSDFPAPDPASNEVLLAPYSKEEVWKKLLNSSNSAPGPDLIPYSILKAKDPGALILTTICRAVQIFGVVPDAWRKANIVLAHKAGDRDDVSNWRPIALLNTMGKVFSGCLADRLDDWGNKNHVLSPQQKGFREFEGCLEHNFLIQHMLSQARSSKSDLFLAWLDLENAFGAVPHSLILESLTHIGVPPQVIEMIKALYTNARCKIRLPEGLSDAIPMEAGVRQGCPLSSVLFNFTIEHMLRAVSGDDARGIVIQGSNIKFLAYADDILLAAPSAEDLSQHLNVISDSAEKAGLRFKPRKCATLGIRNAPRARGTLPNTFLIQGHQVPFLRNDEAYKYLGVKVGYNPKQDYHCLVDLVCDQIDLIHNSLLAPWQMLQAIRGHILPRIEFLSRNLALKKKDVLRIDKKIQSRVKSILNLPQRADANIVRVAIRKGGAGVQSLSDTVDIDHITYAMKMLSSKDQLVREAASQSLKEAVRKKAGVDPTDDNIFAYLSGSLPVPRSGGGVAGSVWSNVRAACLRLNKKFPVSWSRCSGTGMIKITIGHISSRSTTTITQSSRAYLFRQLKSAMSDYYLERISAKPDQGKTAAPVSLHPASSAFIADGSFTRFCDWRFIHRARLGVLPLNGTRRFGNQVRKCRRCGFVVESIPHVINHCTSHSATWNLRHNEIQDRIVRAIPSRSGTVTVNRRVPDTTLPLRPDIVVRRPDGSLLIIDVTVPFEDRVEALVKARRIKINKYQPLVDELATKGITASVDAIIVGALGSWDTCNDYVLGQLGVSRKYATMMRKIICARTIGHSRNIYVSHITGSPQSM

SEQ ID NO: 32430 - protein, 2088 aa, Oedothorax gibbosus
MTSLITSMDVPYPIKVPILCPICTTARTSTRSSGVFGGVEPLVLTADTDEPTRKRIHSGVESYKKHVLKAHSDVHQGRVNFRCTKCDVSFPFMSSMLKHDERGTAQCKSHAPRPKKASHLTRPSGAAAGARARPGRPAAGAGGSPRSPLSTPPAGASPRASSSAIPGKTLPIGAAGAAGSPVLVNLLSPAPSPSTVRHEDNAHVDPALLRPILPADHAGTPAAGNVAAGTQAPLVFLPADQPPSGSSEVPSLLLDCPDPAGTPGAGACADLGTHSDFLTSPLLPDGGLSATTYHDCPGRAGAIDAGPATSYVPLTSPASPLLPDGGLSATTHHDCPGRAGAIDAGPTASCVPLTFPASPPLPDGGLSATTHHDCPGRAGAIDAGPTASYVPLTSPASPLLTDGGLSATTHHDCPGRAGAIDAGPAASYVPLTSPASPLLPDGGFSATTHHDRPGRAGAVDAGPAASYLPLTFTPAAFPPCGHTTGVPLLDASPAHAGFAGAGTPIVRGLPPFFPPPRAALAGGHTLKDPFGHAGTLAAGTPAAGTQALSVILPADHSLSCPSDGASPLLDCPDPAGTSDAGTFAGLGIHSDVPISPCLPDGGLLVTTHRDCPGRAGAIDAGTAAPIVPVNITPTVPPWGHTADWPSSDASPDHAGSSGTGTPPVTPVPVGLLTTCGRLPCFPPLVPLSAISALVHDPVASGGRGPTALPSRTGTTPPERLVRGETNTLDLTLASPSLTWVDSLLRSPSEARLQMLMPAPLAEHIPTSSGAVSGTVPSMTASSAVTLLPRGAPPLIDISPPRTFTCIYCERYFRCEESAANCMLSHMPGSSDVRLTGGLMSPCPSDSSVSSRFADSDGDLELCLGNSTRLSSSLCQTLSPTAPSPWLTPGALDPMLLYRPGPSAPPPDLSWRLPSGLLPGWPIHTPPVLLGARPDILITSSTPSSLCEVGVPLDLSPSGPFAMPGEILHSPWTGPTDPASPARAPSPVLRDSAVWDVAPGLPAVPAPSAFHLGPPPFPPWPPRCGPAVGLTPPLPAGPPPLWMPPPAFPRPAPGHVAWPPPDEAILAMGPPCGQGNLPMLGDCDDGPSLIGDLAPIGPGPVAPPPSPPGDDPPGEPTDDVDWDDGVPPAIFPDDRLLFLGDARPSFFQQKWIDIFVNISSIEALDDQITIYTAELQQALRRPARRGRRRRPPITAAVPPILADALGRQGAQSSTFFNNGLSTYDKEAATKLQRDFNLMPGRTVDAVLHGGREPCPIPAERLVAHFGEVYSSRPHSHEFVFSDFPAPDPASNEVLLAPYSKEEVWKKLLNSSNSAPGPDLIPYSILKAKDPGALILTTICRAVQIFGVVPDAWRKANIVLAHKAGDRDDVSNWRPIALLNTMGKVFSGCLADRLDDWGNKNHVLSPQQKGFREFEGCLEHNFLIQHMLSQARSSKSDLFLAWLDLENAFGAVPHSLILESLTHIGVPPQVIEMIKALYTNARCKIRLPEGLSDAIPMEAGVRQGCPLSSVLFNFTIEHMLRAVSGDDARGIVIQGSNIKFLAYADDILLAAPSAEDLSQHLNVISDSAEKAGLRFKPRKCATLGIRNAPRARGTLPNTFLIQGHQVPFLRNDEAYKYLGVKVGYNPKQDYHCLVDLVCDQIDLIHNSLLAPWQMLQAIRGHILPRIEFLSRNLALKKKDVLRIDKKIQSRVKSILNLPQRADANIVRVAIRKGGAGVQSLSDTVDIDHITYAMKMLSSKDQLVREAASQSLKEAVRKKAGVDPTDDNIFAYLSGSLPVPRSGGGVAGSVWSNVRAACLRLNKKFPVSWSRCSGTGMIKITIGHISSRSTTTITQSSRAYLFRQLKSAMSDYYLERISAKPDQGKTAAPVSLHPASSAFIADGSFTRFCDWRFIHRARLGVLPLNGTRRFGNQVRKCRRCGFVVESIPHVINHCTSHSATWNLRHNEIQDRIVRAIPSRSGTVTVNRRVPDTTLPLRPDIVVRRPDGSLLIIDVTVPFEDRVEALVKARRIKINKYQPLVDELATKGITASVDAIIVGALGSWDTCNDYVLGQLGVSRKYATMMRKIICARTIGHSRNIYVSHITGSPQSM

SEQ ID NO: 32431 - protein, 959 aa, Zanna intricata
MAVSRTASQTGFLDTTTLYSIPWEPGKCNICSSWFEKPGDLVRHHKLLHPGACMGFSCSMCSRTFGRPHAALCHYSKCRGVIPQELPFQCEVCQRCFASKSGRSQHKRHVHPDVRLSERRTLTRALRPEPHDPSLDVTGATSTSNVNLFPPLLCQDGGQVPVPLEDHVDCGDSLRHDWIQKDHLHPLARKLADTWATLEPDATWIEAFVEKITSHLLSNDKRRLSQFKIMKPRRRRLVRNQKRKRFATTQELFKRCPRKLGEMVRSNHLNELLPGATVLPPVDLIRKDFEELWGSGSPCKLRLPRADVAPRTLLAPVLNGDVKNRLKRMKPNGAPGPDGVRKEMLIGIPGVFDLLARLFNLLLWSGYYPAAWRKHSTTMIPKTGKDLSAASGWRPITVGNTVARIFSGILDNRLWSSVSLFGAQRGFTTGNGCFINVRLMDEVISTGKRTGLYAAVLDDGKAFDSVSHDAIVAVLEANGVDTLLSRMIREMYLNIVTTFKNCGNLQLPINRGVKQGDPLSPLLFSMVLDPLLRRLQSLPGAFTVNNIKIPVLAFADDMVLLFNDERSLQGGLNEVVSYLQTVGLGLSSAKCGVFGLRRQGKSWIDVPVQTSTDGSLLRQFSATEEIRYLGAYFSVAEGVSCRKSIGEVKQAADRVSRLALKPRQKLDLLCTYVLPDYYHLFVSDIPSANKLNELEKYIRRLIKDFYHLPQGISNGLLYCRRKDGGLGVPRMFDLVRAANLKPFCSLNNTSDETVQRILLEGQEGSCRKVAGSMGLPWPTSLLATANWKKERKLADFEEWCHQPVQGRGISCFKGSVASNCWLCRKTLCAGEEVDLLKMRSEVFPSMSYLHRVDPDNSKICRRCHVKEELLGHILGECPAGRGARIARHDTIMDVVQHAAEKAGLITAREQLFRAGAETLRHDLVIKTPEGSHRRRHELDKIRMTKTISTNSFVRKDMRK

SEQ ID NO: 32432 - protein, 1047 aa, Zanna intricata
MAVDSTSRTGFLDSAVQYNIPWEPGKCHLCLSWFERPGDLVRHHKLLHAEACMGFTCSMCNHSFGGPHAALCHYGKCRGVVPAELPFPCEVCLRCFASKSGLSQHKRHVHPEARLAERRSLPEVNRRSLPRLPVDVDSLPRRTRSSTRSFDEPSSFAAPPMTSANLLVDDGHPSSPPQHEDEQTRVSLTNCREDIKRAWISQDHLHPLARKLAIIWASSEPSVGWIDAFVMEITTLLLSNEKSKSPRSTTQTSARRCTKTNLKKRRFATTQELFKRCPRKLGEMVRNNHIADLLPGTSTLPPADLIRTDFEQLWGSAGTCDLCLPATRPTTSFSLASISSGEVRTRVKRMKPNSAPGPDRVRKEMLAGVPGIFDLLAGLFNLLLCSSYYPAITRNHTTTMIPKPGKDLSVAPGWRPITVGSSLARIFSGVLDHRIRSSTSLFAAQRGFTTGNGCFINIRLMSEALAAGKQTSLCAAILDIGKAFDSVSHNAIFATLKTSGVNEFLSQMVQEMYSDVMTIFKNCGNFQLSINRGVKQGDPLSPLLFSLVLDPLLRSLQSLPGVFTINGVKLPVLAFADMVLLFENEQSLQRGLDKVTSFLGTVGLHLSPPKCSVFGLKQHHKSWIDTSVRAFVNGSLLRQITATEEVRYLGAYFNLTEGISCNKSFEVVLQAAERVGRLALKPRQRVDLLCSYVLPGFYHLFLSGIPSTNKLNELDRNIRRLVKEFYHLPQSISNGLLYCRRRDGGLGVLKMFDLARAASLKAFSSLNCTDDIVVQRILLEGQESMCRKLAGSMGLPWPTSLLAVELWKKNRKTTEFEDWSHQPVQGKGVMCFKGNIAGNYWLRHQVLRPGEEIDFLRMRSEVFPCMNYLHRIDPAKSKICRRCHTKEESLGHILGDCPAGRGARITRHDAIMDVVERTAKEAGLLTAREQLFRAGAETLRPDLVIKTPEKALIVDATVRYEQGNSLREASQEKKMKYGKITEAVKQDMGVGDVVIHPLVFGGRGGLTSETTRNLATLGLGGLTDIENIVTNILRASIYIARAHLDCG

SEQ ID NO: 32433 - protein, 1057 aa, Zanna intricata
MAVSCTPPAGFLDTTTQYTIPWEPGKCHLCLAWFEKPGDLVRHHKLLHADLSIGFACSMCDRSFGGPHAALCHYSKCRGIVPAELPFPCETCSRCFASKSGLSQHKRHVHPQVRLAERRSLPGMGRRSPSRSRAGSPLRTTGSSTRLSTDVSYQGRTRSSARSSLETSAAFDLSSSLIDLPVNENLSASRDQQDQVLLSSAECREAIRRDWVSRDHLHPLAIKLATFWTVSEPSNDWIDSFISEVTNSLLRPKDSTSPQSVRKPSRRRSTRNLKRKRYAATQELFKRCPGRLGEMVRNNHMSDLSPGTPVLPPADLIKSDFERLWGSIDDSVPCPPSTDFMTSTTPISSGEVRARLKRMKPNGAPGPDGVRKEMLIGVPGIFDLLAGIFNLLLWSGYYPAIWKHHVTTMIPKPEKDLSVAAGWRPITVGSSLARIFSGILDQRIRSSISLFPAQRGFTSGNGCFINIRLMNEVLAAGKRTSLCAAILDISKAFDSVSHNSIVTTLKASGVDELLSRMVGVMYTGVTTIFKNCSDLQLPINRGVKQGDPLSPLLFSLVIDPLLRHLQSLPGVFTINDVKLPVLAFADDMVLLFEDECSLQRGLDDVTSFLRSVGLHLSPPKCSVFGLRHQNKSWIDTPVTATVNGSLLRQVIATEEVRYLGAYFSVAEGISCAKSFEIVLQAAERVCQLALKPKQKLDLLCFYVLPGYYHLFLSGVPSANKLNELDGHIRRLVKQFYHLPLSTSNGLLYCRRRDGGLGVPKMLDLVRAASLRAYCSLNNTNDDVIQKILLEGQESICRRLARSMNLSWPTSLLAIDTWKKSRKLAEFDDWNSQPIQGRGIACFKGNLVGNCWLRRRVLHPGEEIDLLKMRSEVFPCKNYLHRIDPANSKICRRCHAKEESLGHILGDCPAGRGARIARHDAIMDEIEHSAKEAGLLTAREQLFRAGAEALRPDLVIKTPGRALIVDATVRYEQGNSLRDASREKRSKYSKIVDSVKQDMAVDDVLILPLVFGARGGLISETTKNLSTLGLGGLPAMERIMSNILRASLYIARAHLDCG

SEQ ID NO: 32434 - protein, 1030 aa, Zanna intricata
MAANSDTSQTGFLDATTTYNIPWEPSKCHLCSSWFEKPGDLVRHHRLLHGEACMGFICSMCSRTFSGPHAALCHYSKCRGVVPVELPFSCDICSRCFSSQSGLSQHRRHVHPEARLAERRSQVTSRHSPPHPSTGSPPSRRTRSSVRFSDEPSTSTSLFPTEPCSTDRISTSTSRSRDDIKQDWILREHLHPLAKHLASVWSTSDPSFDWIEDFVKKVTTLFLGNDKLSLPRVVSKLSRRRSARNLKRRRYASTQELYRRCPKKLGEMVRNNHMDRLLPGTPIQPPMDLIKADFELLWGSENISEPHSSASTLTTSLTAISPSEVKARIKRMKPNGAPGPDGVRKEMLLGIPGVFDLLAGLFNILLWSSYYPVSWKEHVTTLIPKPEKDLSVASGWRPITVGSSLARIFSGILDCRIRSSVSLFEAQRGFTTGNGCFANIRLMDEVLTAGKRTGLCAAVLDISKAFDSVSHSAIFATLRANGVDDLLTHLIQEMYFGVTTVFKNCGNLRLSINRGVKQGDPLSPLLFSLVLDPLLRRLQTLQGAFTINRIKLPVLAFADDLVLLCEDQLSLQRGLDVITSFLSSVGLCLSPSKCAVFCLRSINKTWIDTPIDAYVDGSLLRQITATEEVRYLGAYFSIADGLYCDKGFREVLQATERVSRLALKPRQKLDLLCSYILPGFFHLFISGIPSANKLNDLDRNIRRLVKEFYHLPQGTSNGLLYCRKRDGGLGVPKMYDLARAACLKAYCSLNNIADRVVQKVLLEGQESTCRKLAGSMGLPWPTSLLAIESWKKHQKLSEFEEWSHQPVQGRGIQCFKGNTAGNCWLRKEVLRPGEEIDLLRMRSEVFPTKCYLHRIDPANTKICRRCHAKEETLGHILGECPAGRGARIARHDKVMDIVEQTASAAGLLTAREQLFRTGAETLRPDLVIKTPGRALIVDATVRFEQGNSLREASREKKDKYAKIIDAVKEDMGVSEVMILPLVFGARGGLISETIKHLTTLGLGGHTDLEGLIAGILRSSIYIARAHLDCG

SEQ ID NO: 32435 - protein, 1037 aa, Zanna intricata
MAASNIVSRMGFLDAAVKYNIPWEPSNCHLCLSWFERPGDLVRHHKLLHAEASMGFACSMCDRVFGGPHAALCHYSKCRGIVPNELPFPCNICLRCFASKSGLSQHRRHVHPEARLAERRSLPELDRRVSVVDPPLMRLRSSTRSSVSLDLADSSATSRNLSDENYQKDGSPISLTECCEAIRLDWVAQEHQHPLALKLASSWVTSSMPIEWIEVFVQDITTLLLQNVEAAPSRFSGHNKRRKLSHRHAKGNLKRRRFATTQELFKRCPRKLGDMIRNNHVSDLLPESSVLPPSDLIRQDFEQLWGSAGDCHLCLPTIFSETSLSPVSAKEVKARVKRMKPNGAPGPDGVRKEMLAGVPGIFDLLSGLFNLLLCSGHYPTIWRRHATTMIPKPERDLSVASGWRPITVGSSLARIFSGILDQRIRASTSLFTAQRGFNTGNGCFINIRLMNEVLSAGKRTSLCAAILDISKAFDSVSHNSIFATLEASGVNGLLSRMVREMYSDVVTTFKNCGDLHLTIKRGVKQGDPLSPLLFSLVIDPLLRRLQTLPGAFTINGVTLPVLAFADDMVLLFKDERSLQGGLDEVTSFLRTVGLHLSPTKCSVFGLRQLNKSWIDVPVAASVDGSLLRQITATEEVRYLGAYFNLAEGLSTKKSSELVLLAAERVNRLALKPRQKLDLVCTYVLPGFYHLFLSGIPSANRLNDLDRNLRRLVKEIYHLPQGISNGLIYCRRRDGGLGVPKVFDLARAASLRAFCSLNNTDDEVVQRILLNGQDSLCRRLANSMGLSWPTSLLAIDVWKKNKKIVEFEDWSHQPVQGRGVACYKGNIAGNCWLRQPMLRAGEEIDLLKMRSEVFPTKSYLHRVDPANDKICRRCHVKEESLGHVLGDCPAGRGARIARHDDIMDEVERTAKEAGLLTAREQLFRAGAEALRPDLVIKTPERALIVDATVRYEQGNSLREASREKKMKYSRIVDSVKHDMGVADVVILPLVFGARGGLISETTRNLTILGLGGLPVIEKIMSNILKASVFIARAHLDRG

SEQ ID NO: 32436 - protein, 917 aa, Zanna intricata
MERRSSSGMSSRPTPSLRATDIPSRRTRSSDAISTEPQIPVVVPLDEDNLSSEQTSSTLVDDCEHIRRTWISQDHSHPLAKDLAIVWEASIPSAGWIESFVEKITILLLDNVTVKPSHSAIKLPHHPRSKGSAKRRRYATTQELYKRNPRKLGDMVRNGYTVDLLPGIPVLPPTDLIKKDFQDLWGSKGVCELRLPTSSVYTSLPPISSGEVRARVKRMKPNGAPGPDGVRKEMLIGISGIFDLLAGLFNLLVCSSYYPISWREHFTTLIPKPDKDLSVASGWRPITVGSLLARLFSGVLDARVRSSVSLFEAQRGFTTGNGCFVNIRLMDEAIATGKKTGLCAAILDISKAFDSVSHNSIFAALQANGVNELLSRLIQEMYIDVTTIFKNCGGLRLPINRGVKQGDPLSPLLFSLVLDPLLRRLQSLPGVFVINETKLPVLAFADDLVLLFQDEHYLQRGLDVVSSYLRTVGLHLSPAKCGVFCLRHSNKTWVDAPVSISIDGSLLRQITATEEVRYLGAHFSIADGLSCKKSFQTVLHATERVNKLALKPRQKLHLLCSYVLPGFFHLFISGLPSANKLNELDSNIRRLVKEIYHLPQGISTGLLYCKKRDGGLGVPRMFDLVRAASLRAYCSLNNTTDNVVQKILLEGQENTCRRLAGTMGLPWPTSLQTIDNWKKQRKLADFNEWSQQPVQGRGTPCFKGNLIGNCWLRKKLLHAGEEIDLLKMRSEVFPTKCYLHRVDPANVKTCRRCHSKEESLGHVLGDCPAGRGARIARHDKIMDEVERVATAAGLPTAREQLFCTGAETLRPDLVIKTPGRALIVDATVRFEQGNSLREASREKREKYSKIVDAVKHDMGVTEVLILPLVFGARGGLINDTLKHLATLGLGGPTDVENIMVNILRSSIFIARAHLDCS

SEQ ID NO: 32437 - protein, 1575 aa, Stegodyphus mimosarum
MSSPPRLAARPRPRPAPEVRSPGSRSPPFATREGSAPCRQFSLDPSTSANATEGCPAFPANTSSPDAQIASSPGAATLTVASAKSRHVAAVLTPSGPPLTGNGHPRQLARRIHTTTTGHASLNRPACASILTASMTGTVMDATPPAHPSTLAPSTSCSMDSHNTAFVTPTGPTLTKSGHLRELLERIQAGTTARTSLHTLNTPTCSVDPHAVPRGPSMLPSTSSSKVLAVSPASTTDTNASPTKVASLPCSVCGRRFTDRRRLKKHARSHNRFLSSKQNGSHATPPSSRQPSDSPVCHHTRSRATYTKSGPGTATANAASPLTYAQAVAAPPRDPNAPVRTTTTPPAFPPEHHMDSDVLIISLSPGSSDIHLDTDVTSRSTNVPPPLHNINASSQIPAAAGMETSGRIDTTAASSPPRDDVDLPQPTTQPVPAHVFPGMTRRCQSAFHLVFPVTDTLKCTERDCPRTFHSRAWTQLKHSICRHLRYAHNLNITETNNWCSHCEQNIASRVSRHSCFLDRPVMVPSGLTHRWTCSTCEFSCQTRGGLLNHQARHRRERQRESMQLQPVPERRRRRHLRRRTGDNDLPLDSAHEIDMDERHTPDRTPNDVPQPHDDADDDITAGIPEALATEITPPTDHPVGFEDHPAATDPGPEVAEDILEHETDWPLAAFRPRLLEILRDNPVLRWRDFEDCLEEIHQVAVEVVKIPPPGTQHRPPGPSPVNDPKVIQRLYRRNRRRAVRLVEGESPRCEIDSATIIDFFTSDTDSPPTEGSIYHPPVTPPPEVDVTPFTASEVASRLRSAENTAPGPDRLTYHHWRSLDPDAKILALAFNICIKARRIPDAWKESTSILLYKKGDKEEVSNWRPIALSSTIVKLFTGCLARRFSSWLIENNILSPAQKGFLPYDGVFEHNYVLEQRLRYARRSKEDICIASLDISNAFGNLPHDAIFAALTTSGAGRHFTDLVRSIYSDASTRFLCHDAITDPLPITKGVRQGCPLSGLLFNLTIDPILRAIQTSDEGHQVLAYADDLLLLSKSPVELQRNIDLVASLATKLSLRFNPYKCTSIHLSGKPPIGTRNSAFTICGDTIQCLNDGDATVFLGKPVGFQLPHDENALRSYMRSCNILLTSKLAPWQRIDAVKAFFYPALAFDMRVGRLRKGDWSRLDDFARPLLKETLNVPPEAANEYLYGDTEAACLGVPLAKEDSDIARVDGAFKLLTSNDPVVRNLAWDDMTRFISTRIHRSPTSEEIAGFLSASDTGPFQGTSNASSSPWSAARAASRRLRITWTVTDHQSVSITLGSNCIEPSKRHLLFRTLRKAKRANRSAKLIAYPSQGKAIECAAASKASNHFIREGTYTRFADWRFIHRARLNLVPLNANIRNNSGSKGCRRCNRPLETLPHVAGHCMRYSRLYQQRHNAIVQRIKNAARGRWEVESENQVFPGTNLKPDLILSRDSSVLILDITVPFDNRLSSFEAARREKEEKYAEVADLLRGRFADVRIEAIVVGALGAWDPKNDRVVRRLCSKKYANTMCRLIVSDTIRSTRDVYIEHLTGERQIPWRERERRDDQRQIIQETTG

SEQ ID NO: 32438 - protein, 900 aa, Athalia rosae
MQGSHGGPEQRPHSVERIAPPENDGWKQPIIREACSGYKVSDSWNDWLRRLQGVTHSNELTTSTIDTLYNELVAKICALNPIERTASSTSNSRAGQATKTGRPRRTGKVSRQRFAYARCQMLWDECPKKLAEMVVANDLSILERRQSPDAAGVKQLYHELWGQAGPEVTAHDNCEEFIPVERMLTPVTPGENQKRLWKIPNGSTAGPDGITKANLKGEDVCIALSVLFNVLFLGQLYPSAWRVNRTTLIPKAGKDTRDPKNWRPITVSSMISRIISSLLDRRLGSCVVQSCRQKGFTEENGCFSNVQLLGAALKQAKNTGGVVSVLDISKAFDTVPHAAIEGCLLMKGVPKLVAGYVSGMYRDCSTVIKVQGGEDIHVTLKRGVKQGDPLSPLLFNLTIEPLLEQLQSMTVGVDVEGENLSVLAFADDITIIGKDASTADRQLQFIGDYLMRLGMSLSVGKCLTFEYVSKGKTWYLRNPGIKVNGAPVPYTSPDEVFTYLGAKFSPWRGLLHEFELAQLEQVMKRVRALPLKPMQKIGLLEKYIFPRFTYGLITQPPSVVMLRKIDVIIRTETRCILHLPNSVSNSFLYTPRRSGGLGLLEFEKMVLIAALRNGLKARASLDHVQRAVANLNRAETVDSSYAKALRLPWPITIDQLDKFKATVKSNHLKAWSRQGWQGQGVKDFQDRICNKWLARDDLLKPSRVTDAILLKTNTYPTRAVAKIVDPRVNSACRKCGRSSETLGHILGMCIYTKDKRIRRHNEIKELFRDRFAKRHPVLDEPEIVVSCEKFRPDLVVNSNEKGILVLDVTVRYENRDYLQQGHNEKDSKYKQILNELKRDLNSNSARVVPIVVGSRGGIRNFTKVALKDLGFGNKDLLTISMIALRSSIEMINEFMDDNPA

SEQ ID NO: 32439 - protein, 1493 aa, Catajapyx aquilonaris
MPPAPSPRTARTWRRRGALSDLDTSSSSASDFSTSSGPDHDTHPCLLPSDGLGPSRLLVPARSPGPEPASPSADDGDVATSPAADTLDASGLSNASTSTGPSGSDSPLPSESSGRSELGDQHPSPRAASSPPRPPASGGSSSPPAQSPPGPPDRGPPSRQPTINHNGSLTLFMPLPSPTRCPEGGCNFTSTSSLFGAAKVLLKRHLQRVHAIYIKRTLPKCGRCLRHPGKRPEDHTCAADTAGRRPAPARHPGAPAGHTHGAAADSQSDSPEGRPAAEAADIFPLHDQDGGVTSSRRAMVLPTSGDHVARARQPESRGDRISLFFPVPLVVRCPEPECGAAFRVGGPWTGRKRSLSRHLQLEHRMEPTFVFLCNWCGHNIDGHPSAHLTGCPSTPAHWLEPTVPTPHPCDKCDVGFTSRRGLRNHQLWHRRAEIAITGGDSRPCAGRTGPSVNNGQDDVTVPPTGVPARTDDQRTASSQICPPSPCDSASIPHSPPPDGPILLPSCPSIDSPQSQTYSSDSSLPPSQAGPTSPSALHPSPSTQMRGPTASPPPSLPSEGGSGLSDSEQEEDHEQGEMDSDGDGYTPLSMDDILSPDGRTPIHDHLPQLLDILRREPSDETWALFQAVLEEVTDTAAVTIKLPPRRASAPNRPAPDVNDAKVIQALYRRNRRRAVRLIMEGEGSRCTIEREQLERYFRAVYQPRPCDPAVYTRRRERPEVPMERFTQAEVGGRLRRCENSAPGEDRLTYGHWRGLDPEAALLTTVFNICLQFRRVPDSWRASTTVLIYKKGDRADPANWRPISILRTIAKLYSGCVASRLSTWLENFQVLHCGQKGFRPYDGVLEHNFVLQEAMGRALDGKEDLCVGWMDLSAAYTSVPHGAIEASLRAAGVGDALTDVAVDLHRGGTTTILTAEGPTSTIETDCGVRQGDPLSSVLFNLAIDPVLWAIQPGEGEHHVLAFADDITLLAGSPEELQQRMDVVAQEAARISIGVNARKTVTLHLSGTPPAGPRPTIFSLGGQPVPHLSEGETTSFLGRPVGFHAVPPHSNIEAYISAGGKILSSLLAPWQRLDALKTFVFSSMVFSMRMGSLPKTAWARLDKALRPAIKQTLHLPDRTANEYLYGSRRAGACGLPLAAEDSDLFRLDTGFKLLTSPDPEVARLAHTQLNATVSARLRREAVEEDVAGFLSADNGGEFHLSTSRRANCWTDSRKAAGRLGVRWSFTNGLPTLAMGAAKVPPQCRRKLTSILRQALRRTRDARLHSLPAQGKVMQCVALHPSSSHFVATGRYTRFADWRFIHRARMGTVPLNGCKVWSTTSKACRRCPEQNETLPHVLGHCMRRHGVDYQKRHNAIVDRISRAASPKFTVERANQRVTPGCPLRPDLLLTQGRDTAIVLDVTVPFDNRPEALREARERKESKYAPLAAALQQRFRRVTVEAVVVGALGSWDPRNDKVLRRFCSRAYLATLRRLCVSDTIRWSRDIYTDHLAGDLRRQ

SEQ ID NO: 32440 - protein, 1004 aa, Linepithema humile
MQLNLNPGPSGSRGPATRGRSAKVPDSADLQDGFCCEFLGCGRSFETATGRGLHHRRAHPDWYDQRQNIVHVKARWNDEETRLLARKEASLTRCNVRFLNQALIEIFPDRTLESIKGKRKQPAYKQLVQEFLTEDQPAEMDEGSEPEVEAIEMVDYRAVIAGYVQSLPVPQVVSHELPRLLRLCGSLNRRTQAQVLDELALYLREVFPDKQHTKAKGQAAKANSATKKQARKAEYARTQDLWRKNRSKCIRIILDDITGVKVPPKEVMAPYWRAVMTAKDDTAPGAAVQKPVINELWSPITCDEVRAAKPPSTTAAGPDGVSARLLRKMPNEVLCRVLNVILWCGQAPKQLLESITILIPKKSGAIEPGDFRPLTISSVIIRTLHKILARRMARSITLDQRQRAFRKTDGCSDNVFLLDLILRHHHAKHKPLFMASLDLAKAFDSVAHKTIQETLCLTGLPQPMVEYIMDTYGRSCTRLSCEGWKSDWINPTCGVKQGDPMSPIIFNMIIDRLLKQLPEDIGAKIGDLTVNAAAFADDMLLFASTPMGLQGLLDRAVGFLSLCGLKVNASKCLTVSIRNVPHEKKTVIDKDTVFLCQNRVLPALKRTDDWRYLGIPFTPEGKAQVKVTAKLLDAVARLAKAALKPQQRLFALRTMVLPGIYHLLELGCTTISILKKCDKIVRHTVRKWLNLPPDTPNAYIHACVKDGGLGIEAVRWNGPLRRLNRLKSLPLAQQNRDGTPGAFLNKEMDTCNKRLLPGMISAKEVTAKWAELLYARVDGGGLKESNKVPKQHSWIMEGTRFLSGRDFLQSCKLRINALPTKSRTTRGRPVDRMCRAGCRWPETLDHVIQKCHRTHGPRIKRHNAVVSYIAQGLRKQEYMVEVEPIIVTADGRRKPDIVAKLGQVALVIDAQIVNDQIDLDQAHHRKSEVYKDIDAKLKEKYAVTSIKYMSATLSWRGVWSKASADALLELGVIRAGAVKVISSRVLIGGLTAYHQFNRTTTVAG

SEQ ID NO: 32441 - protein, 914 aa, Linepithema humile
MNQALLEVFPERSLDAIKGKRKQPAYKVLVQELIESMSAEMDEDIAQDSSDDVVDDYRTAIATYIAGLPPPQNDNFGAVRLMRVCDLLTHKTEIEVLDELAVYLAEVFPNKKRKSKSSPMTGAVNLPKKQARKVEYARTQDLWRKNRNKCIRMLLDDTVGVKAPPKEVMVPFWNTVMTSTEDISPPITERKTVIPDLWSPITPFEINKAKPANTTSAGPDGLTARLLKSVPNEILCRVLNIIMWCEQAPQQLLESTTILIPKKSGAKDPGEFRPITISSVLMRTLHKVLAARMARLIKLDQRQRAFRSTDGCSDNVFLLDMILRHHHNKHKPLYLASLDLAKAFDSVTHKTILETLCMMGLPKPMLSYIKNIYEGSSTRLMCEGWRSELIRPTCGVKQGDPMSPVIFNMVIDRLLKMLPDDIGARVGDLTVNAAAFADDMILFASTPLGLQSLLDKSANFLSQCGLKVNASKCLSVAIRNVPHEKKSVVDKDTVFTCRGRMLPALKRSDDWKYLGIPFTPEGKSTARIAQKLQDTITKLSKAALKPQQRLFALRTMVIPGIYYQVELGNTSISLLRKCDAIVRHAARKWLALPADTPNAYFHSGVRDGGLGLEAVRWTAPLRRLNRLKSLPLAREQAGGVPGAFLNNEITMCNRRLWFDGAILASASDISKKWANLLYARIDGVGLKESDKVPQQHSWIHEGTRFLTGRDFLQSCKLRINAMPTKSRTGRGRPKDRLCRAGCNWPETLDHVLQKCHRTHGLRIRRHDAITSYIAQGLSRYGYTVEEEPKFQTAGGLRKPDIVAVKDQLGIVIDAQVVNNQLDLDEAHRKKSGKYRDLEEMLKQKYLVPSIKWTSVTLSWRGVWSAASANELLDLGVIKKKSLKVISSRVIIGGIAAFNQFGRTSVKERKGVRRR

SEQ ID NO: 32442 - protein, 1272 aa, Panagrolaimus sp.
MNINLNQRPENVGVTLTSRRGNGTWTWQQEQALINACIVSFGFNSINWHGVIGSMIESGMLQGRTLKSLQVKWSKLKKKLSTEQNARWTAVQRGQRIIRRKPERRVEVVSESSSDEETEPLIGALNRTYTVQSSGDALSVVEEERLGEPSGDGVDPMNNSDIMGVSIDDYLTQNLVNVGESFEGDDEDPGSIMINGAGECPEGHVDPALNIEFSCDRIENGTSPREATEFESYYERASEAYKKFLPLVKATVERRRLPALNYLTEFEKVTLNKLMLKAWNESDLSRSNCEQYKICNETLYASVKAVASLRTDAYSGSKKWFTNKEKELTRLRRLIGWSVTTHTYNENKTLKRTAKIERIRIKITNEMRKIKSVDSLGFINMLKERLTILKQEMSQKKVDLERRSLRIRAGVCPNLQRIRKHPEMETNSSSLTAETATEYWSKLASPGSPVNLSDPVISDWLKQLKEDCTAPCEGVMNLAYAFKKAKNNTAPGNDGITSFYWKYVDNARNWLCSLFKVSLLDGNIPQWMCRGRTVLIPKAGDPNDPSKYRPITCLNTCYKLLTANMANYMYERVLNTCGLPKEQRALRRGEWACAIAHLKDLAMMLDSTCQVRRQILVAWIDLEKAFDSTEHSVLIECIKSLNLPKGFEALLLRMISQWETKIEMRVDGKVRCGRPYRILRGILQGDSISPLLFILVTSVLSYNLNKLGKTVPYTKVARIECQIFNHQLYVDDLKLYNRTRAMLLQALQLTNKVYRAIGMKVNIAKSAATAKVTLSGASDPIPHLGAGEAYKYLGILQLLRTDFEATLKGLQDKVKSKVCEIFDNDLTYRQQITLYNTSVVSMVSYVFINAFPKGKMKTLLLAARNIDKMVRKLLIQYKIRQRSNIVARLYLDCSNGGLGLRSCEEEVLSVMIVRGWLILAEGELQGARRLFERMSRRGKRNPLSDAAGAMERLGIRDVHINEAINSSETPSKGLRKLIHEKYQNDLINILKKTEYFDRNMKFDFIDYDLSSLWIKSGKMNAVSMRNAFATQELQLVTRGHYSQIISCRNSGDQLCRKCHKEREDPMHILTRCEHWLTNLFVERHDSVARNVYYRLSHFLKLEPIHHTKNVPSKRSIDGVDIYWGFPMQTSRPLHHNRPDIVVIDYVKKRALVVEIACVNVKNIATVERVKRVRYEVNGETLVLPTNVDSVSRGHNMSLDLRLRLRLKEVQVAVIVVGVCGEVSLNFVHEVEKILQFIECSDRRIKTDLMERIQRSAVIGSSRIIKNHLVGAD

SEQ ID NO: 32443 - protein, 1085 aa, Hexapoda sp.
MCTAILGRDWQDCLPKVVDNLNTKPLLLRMNSLENVKKGVARRLKTRVPVVEYMDGVYECPVAECRRPFSSARGAISHYSLIHKRAEDANRALTTSIPCVLNDTERIDPTAGINTSICFLKWTTEELSFLCRCEYEVRDVPRGRPRLVYNMMANLGFKRTLQAVETQLRTKKYRDMRDQLFTQWSNVNAVQYTGPSPGFSVTARLIDPNLMGQSEAVTPEGESNRTQRSTNIVHIIEYLEHLGTKNPKVEYNEPLLDEIIKCLSNDIPVQDELEAFLQRWPCERDSRCRKPKGPKGAPVSKRHVRRLVYKRFREKWKKCRSRVASEVLEGRTEGEIKPCDIDGFQEHWSETFKMSDSTSCDVTGMKVLNSEYEIWSAIKGDELSQALRDIDVQTSSGPDGIPAKELKQVPARVLLKLLNIFMAMGRVPDCLKRSRTVFIPKKPDSRRPNEFRPISITSVILRLFNKLLARRVVAKANFDYRQKAFLPIDGCAENVILLESIIAEARKRCASVYIANLDMTNAYGSVHHEAIYEALRCNGAPCELITYVKELYSGFTTVLEISDDNANCEINVGRGVLQGDPLSPVLFNMVMDQMLKKIPDEIGFPLYKEVRINGMAFADDKTLVAQTPRGLQIALDITSTEGRKWGLEFNSKKCSYLAIISKRGRKVVVSNKCKFVVNGGAIRGLDTCEPWRYLGAFFTGRGLCTAPVMLNEWLLRLKKAMLKPQEKLYVVRVHLLPKLIHVLSMGVLTAKRLCKMDRTIRNALTGKHGMLHLPVSTPKAFFYAPVGEGGLGLMRLRHSIPAIVINRFGRLQESHSKIVRNVTQLSDDIYGSTPDLVTKINAMLLHEHVDAEGLSHAKEVPYVHEWVSKGSTAEMSGRDFIDAIKLRINALPTRSRLLRGTGRSNKCRAGCGRPESMNHILQACPRPKGARVRRHDDVVKCVSASLIKIGYEVQMEPIFKTSVGLRKPDIVAVKDGKVYVIDPTICGDNYHPDIRHAQKVDKYESIPEIRSTLAIRYPGSTIEFGSVALTQRGIWSVRSEEFLRDLGVCKEVIKRITRLTILGSIKIFRAFRNSSVMTGGGGHRQ

SEQ ID NO: 32444 - protein, 1120 aa, Adalia bipunctata
MPVARAETVRRMRWTKQLNVELIKAYYMATNLEEDLMNYRERLHIIWTERKPDIPKDPQQLSDQVRSVLRRKVISEAELQSIKEQIRGQADNSTPMSGTPQHERRSIRRSSNRIIPIRLSLNELENIYQGMIVSYEGIPLKNRPPLPKIIYSLNAKTTVSNMNDIIAQNISEHDTLEEICHKVYCAAAAVCQSTGAPLRERTTGRARAELEDVPPWRRRLEKKINDLRRDIGKIYTYLGHENPSARLKREIKTISARAKIKTSSLAYALELRKYMDMLKQKAAALGHRIRRYNERVNRYKQNREFNIDAKKFYRELSGAGVDRNAKPPVKSDMETFWKNIWSSSADHREEADWIKREEERVSEVSDMEPIQVHEIDIKAAMSRQSNWKAAGVDGVRAYWWKQFHSTHEVLARKIEEIIKDPYRMPSFLTEGITYMLPKNNYTNNPKNFRPITCLPVIYKIITSILERKISEHVVNNSILAPEQNGCKKGSKGSNECLIIDMILTKQAAKSKRNISIAWVDYQKAFDSVPHTWIRRILTVYKVDQTIINFLTASMRSSRTSLSVCVNRESYVTDTIAITRGIFQGDSLSPLLFCLAVNPLSFMLKKENRGYVINRSARTKLTHLFYMDDLKLYAANKLELQNQLEIVKEFSKDIKMEFGLEKCAYIHARRETVQETTTNITLSDGSEFTCLQQGSTYKYLGLQQSLTIDQKKTKLKVEENFLGRLKTIMKTKLYSKSLTSAVNVWVIPVISHTFGVIKWTQTDLERLDRTVRTIMTKYRNHHPISSSNRMYLPRDRGGRGLVNLEMLHEKQLERLYTYFQESDDPLHRALSLADVKLSPLNLAGGFLPGKQKSINSMEQEWKNKAIHGRYAAALHSQDVDKPLSTTYLRQGFLMPETEGFIHAIQDQVIATRSYRKHILKQEIANDRCRLCNTTQETIQHLTSACTYLAPKDYLDRHNNVAGILHQEICISQELLKDTQPFYKYKAADFLENDRVKVYWDMGVITDKEIRHNRPDLLVKNKKDSSAFIIDISVPLDENIRKARMEKISKYTDLANELKNIYQLKNVQIVPIIISANGLVDRELAGALEMLGIREYQKIISQMQKAVILSTCATIRRILARD

SEQ ID NO: 32445 - protein, 1120 aa, Adalia bipunctata
MPVARAETVRSMRWTKQLNVELIKAYYMATNLEEDLMNYRERLHIIWTERKPDIPKDPQQLSDQVRSVLRRKVISEAELQSIKEQIRGQADNSTPMSGTPQHERRSIRRSSNRIIPIRLSLNELETIYQGMIVSYEGIPLKNRPPLPKIIYNLNAKTTVSNMNDIIAQNISEHDTLEEICHKVYCAAAAVCQSTGAPLRERTTGRARAELEDVPPWRRRLEKKINDLRRDIGKIYTYLGHENPSARLKREIKTISARAKIKTSSLTYALELRKYMDMLKQKAAALGHRIRRYNERVNRYKQNREFNIDAKKFYRELSGAGVDRNAKPPVKSDMETFWKNIWSSSADHREEADWIKQEEERVSEVSDMEPIQVHEIDIKAAMSRQSNWKAAGVDGVRAYWWKQFHSTHEVLARKIEEIIKDPYRMPSFLTEGITYMLPKNNYTNNPKNFRPITCLPVIYKIITSILERKISEHVVNNSILAPEQNGCKKGSKGSNECLIIDMILTKQAAKSKRNISIAWVDYQKAFDSVPHTWIRRILTVYKVDQTIINFLTASMRSSRTSLSVCVNRESYVTDTIAITRGIFQGDSLSPLLFCLAVNPLSFMLKKENRGYVINRSARTKLTHLFYMDDLKLYAANKLELQNQLEIVKEFSKDIKMEFGLEKCAYIHARRGTVQETTTNITLSDGSEFTCLQQGSTYKYLGLQQSLTIDQKKTKLKVEENFLGRLKTIMKTELYSKSLTSAVNVWVIPVISHTFGVIKWTQTDLERLDRTVRTIMTKYRNHHPISSSNRMYLPRDRGGRGLVNLEMLHEKQLERLYTYFQESDDPLHRALSLADVKLSPLNLAGAFLPGKQKSINSMEQEWKNKAIHGRYAAALHSQDVDKPLSTTYLRQGFLMPETEGFIHAIQDQVIATRSYRKHILKQEIANDRCRLCNTTQETIQHLTSACTYLAPKDYLDRHNKVAGILHQEICISQELLKDTQPFYKYKAADFLENDRVKVYWDMGVKTDKEIRHNRPDLLVRNKKDSSAFIIDISVPLDENIRKARMEKISKYTDLANELKNIYQLKNVHIVPIIISANGLVDRELAGALEMLGIREYQKIISQMQKAVILSTCATIRRILARD

SEQ ID NO: 32446 - protein, 1168 aa, Harmonia axyridis
MNQGGRGQRAGPLRSRPEVEPDGDSCGASGAAPQDGTVSPDSNRMRRPRRSTSLDGIRNRSAELTRRDGRTRWTEEENILLMRVHYIAEDLQQTSNRTYREILTTTWNDINPNKISYPNLLSNRVRWILQNAKFSSVELANIKRSYRPHTPTPTQDLTETEEVNRENQHEQNHQIKNTSKVFNRYLQLYSKISPQDRPGIPRLRGSRKIFESVERTNEVIRMHINNNSTLEDIVDFVYAGAITVCEENNIGRKTKKRETETQKDPPWKARLEKKINGIRKRIGTLHTYLNTTSPSRKVIKRALHIASVSNISREQLKDRLTVECDILKQKAKALGNRLRRYNERVKRYRNNNLFYKNPKQFYRTLETTTTTTSEQKHPTKESIQSTWEEIWSRNEEHDDDAFWIREAEEESSGYIMEEENITEQDIKTVLKKTNNWSAPGPDGLHNYWWKYFTSTHTCLATVFQKALSKPSLIPDFCTLGVTHMIPKGTNSEDPKDYRPITCLPTVYKILTGIITKKIWKHVGKYKIMAQEQNGCRKDARGCKELLIIDTLITKQAKKKQRNLSMAWIDYKKAFDSIPHSWLLKTLKLYGVSKAIINLLKHLMDTWRTRLHVKTNSSNYTTDEVNIRRGIFQGDKLSTLWFCLAINFLSKLLNKSSYGYVIEKRNNTKINHLLYIDDLKLFAANEDQLLRQLKIVTSFTKTIKMELGLNKCAAIHVKRGKISGGDMMRIQDDLSIKILQPEDTYKYLGIQQGMEIRTTEAREAFKHKFFNRLKKVLQAKLNAKAMNTAISTWAIPSLSYSYSFGIVKWTTTDLRALDIQVRGLLTRHGIHHPHASVNRLYIPRNKGGRGMQNIETIHHNIVKDMREYFKSKHLPFYKALSREDQGITALNLASEHHPAEPPTIEELCEDWHGRALHGRYPTVLKNRDIDTERSLSYLKAGYLFPETEGRLAAIQDQVVPTRAYQKNITGRNLPSDKCRKCSQAPETIQHVTSSCPALAPREYTDRHNSMAKVFHQAIALKYGLLKTERKIHEYLPKQVQENDAVKVYWDHPLITDRPIAHNRPDIVILEKMENRATIVDITVPADDNAEKAYTEKIIKYHDLAFELKELYRLTHITILPLVITTNGLVEMHLTGNTAKLGLHEDLIEKTQKEVILWTTRIVRSFLTSN

SEQ ID NO: 32447 - protein, 1289 aa, Coccinella septempunctata
MGQMSPNGPIHALKCPRKDRFTYIYIYIYIYIYIYIYIYIYIYIYIYIYIYIYIYIYIYIYIYIYIYIYIYIYIYIYIYIYIYIYTQGGVSFRGMTAPRTRVTPDLQVSSLRSVDHIAPITRSMNQGGRGQRAGPLRSRPEVEPDGESCGASGAAPQDGTVSPISIPTTRPRRSISLDGIRDRSAELTRRDGRTRWTEEENILLMRVHYIAEDLQQTTNRTYREILTTTWNEINPNRISYPNLLSNRVRWILQNAKISSVELENIKRSYRPHTPTPTQDLTETEEVNRENQHRQNPQINNTNKIFNRNLQLYSKISPQDRPSIPRLRGSRKIFESVERTNEVIKMHINNNSTLEDIVDFVYAGAVTVCEENNMGQKTKKPEMERQKDPPWKARLEKKINNIRKRIGTLHTYLNTASPSRKVVKRALRITSVSNISGEQLKDRLTVECDILKQKAKALGNRLRRYNERVKRYRNNHLFYKNPKQFYRTLETTTTTTSEKKHPTKESIKSTWEEIWSKSEEHDDGAFWIREAEEESSGYIMEEENITEQDIKTVLKKTNNWSAPGPDSIHNYWWKYFTSTHTSLAKVFQKALSKPSLIPDFCTLGVTHMIPKGTNSEDPKDYRPITCLPTVYKILTGIITKKIWKHVEKYKIMAQEQNGCRKDARGCKELLIIDTLITKQAKKKQRNLSMAWVDYKKAFDSIPHSWLLKTLKLYGVSKAIGNLLRHLMDTWRTRLHVKTHSGNYATGEINIRRGIFQGDKLSTLWFCLAINFLSKLLNKSTYGYVIEKRNNTKINHLLYIDDLNLFAANEDQLLRQLKIVTSFTKTIKMELGLEKCAVIHVKRGKITGGDMMRIQNDLSIKILQPEDTYKYLGIQQGMEINTTEAREAFKHKFFNRLKKVLQAKLNAKAMNTAISTWAIPSLSYSFGIVKWTKTDLKALDIQVRGLLTRHGMHHPHASVNRLYIPRNKGGRGMQNIETIHHNTVKDMREYFKSKHLPFYKALSREDQGITALNLASEHHLAEPSTIEELCEEWHGKALHGRYPTVLKNRNIDAERSLSYLKAGYLFPETEGRLAAIQDQMVPTRAYQKNITGRNIPSDRCRKCSQAPETIQHVTSSCPVLAPREYTDRHNAMAKVFHQAIALKYGLLKTERKIHEYLPKQVQENDAVRVYWDHPLITDRPIAHNRPDIVVLEKMENRVTIIDITVPADDNVEKAYAEKIFKYHDLAFELKELYRLTHITILPLVITTNGLVEMHLAGNTAKLGLHEDLIEKAQKEVILWTTRIVRSFLTSN

SEQ ID NO: 32448 - protein, 1167 aa, Coccinella septempunctata
MHQGGRGQRAGPLRSRPEEEPDGVSCGASGAAPRDGTVSPIRNLRRLRRSISLDRLRTRPANSPRRDGRTRWTNEENILLMRVHFIARDLQQRTDRTYREIITTTWNEINPARLLYPTLLSNRIRWILQAEKFSSVELEDIERSCRPHIPMLADDYTDVKENIQETREQPSPQLKKTIKIFNRILQLYSGVSPQERPGIPRLTGSRKIQESVERTNMIISTQLRNDSTLEEIVDCVYAGAITVCEENNKSLKGTKPGMKVEKEPPWKNRLERKITNIRKRLGTIYTYLNTASPSRKVSKKALRIASDLKIRRDQLKEKLTLECDILKQRVKALGNRLKRYNERVNRYRNNQLYYRNPKEFYRMLETSTTTTTTSKKEYPTKDHMRSTWEKIWSEDGRHDDGAHWIREAESESEKYMMESLVITESMIKKILKKTNNWSAPGPDGIHNYWWKYFGSTHKFLAKVFQKSLSDPSVLPDFCTLGVTHMIPKGKNSEDPGDYRPITCLPTVYKILTGTITQHIWKHVDKYNIMAREQNGSRKDTRGCKELLIIDTLVTKQAKRKQRNLSMAWIDYRKAFDSIPHSWLLKTLRLYGVSENVINLLQHLMKTWRTRLQVKTSKDYYRTDEINIRKGIFQGDKLSTLWFCLAINFLSKLLNESSYGYVIEKNTNVKINHLLYIDDLKLFAANEEQLLRQLKIVTSFTRTIRMELGIDKCAVVHVKRGKLSEGDTMMIQDDFGIQTLTHGDTYKYLGVQQGMEIRTNEARETFKYKFLNRFKKILQANLNAKAMNTAISSWAIPCLSYSFGVVKWTASDLKTLDIQTRKLLTRHGMHHPNASVNRLYIPRKDGGRGMQSIESIHHTVVKDMREYFRSKDLPFYKALSKEDQNITALNMASEHYTVQHPTTEELTEVWHNRALHGRYPAALKKRSIDKERSVKYLQSGYLFPTTEGRLAAIQDQVVATRSYQKNILGRNLTGDRCRKCSRAPETIQHVTSSCPVLAPREYTDRHNAMAKVFHQAISLKYGLINTSKKIHEYLPREIQENDEVKVYWDHPLTTDRPLAHNRPDIVVFKKREAKAIIVDITVPADDNAEKAYTEKVVKYQDLAFELKELYRLANITILPLVITTSGLIEVHLMENTTRLGLEERLIEDAQKEVILWTTRIVRRFLMSE

SEQ ID NO: 32449 - protein, 1165 aa, Adalia bipunctata
MCQGGRGQRTGPLRSRPEEESDGVNCGASGAAPRDGTVSPILNAPRRPRRSISLDGTRTRPAELLRRDGRTRWTDEENILLMRVHFIARDLQQETDRRYREILTTTWNEINPGKLSYPNLLSNRVRWILQTEKFSSVELENIERSCRPHAPTQVENNTENEENNTETQRQPNTQIKKTEKIFKKNLQLYTGISPKERPGIPRLKGSRKILESVERANYEIGLLVDYNSTIEDIVDYVYAGAVTVCEENNIGCKGKKQETETEREPPWKIRLEKKIINIRKQIGTLYTYLNAASPSRRVIKKALRIASEYKIRNEQLREQLILRCDILKQKAKALGNRLKRYNERVKRHRNNQMYYKNPKQFYRTLEETTTTTEKRYPTKESMQSTWKEIWSEVGEHDDDAFWIREAEDESSGYIMEEVNITEENIKAVLKKTNNWSAPGPDGIHNYWWKYFDSTHRFLAKVFQKALTNPSLIPDFCTLGVTHMLPKGTNSENPRNYRPITCLPTIYKILTGTITQQISKHVGKYNIMAQEQNGCRKDARGCKEMLIIDSLITKQAKKKQRNLSMAWIDYKKAFDSIPHSWLLKTLKLYGVSEVVINLLQHLMKTWRTKLQVKTDRNIYTTDEIKIKRGIFQGDKLSTLWFCLAVNFLSKLLNKSTYGYVIEKRNNTKINHLLYIDDLKLFAANEDQLLRQIKIVTSFTKTVKMEIGLDKCAVIHVKRGKLSEGDAMIVEDDLAIRRLGPDETYRYLGVQQGMEIKTAEAKEIFKNKFLIRLRKILQAKLNAKSMNTAINTWALPCLTYSFGVIKWSTADIKALDIKVRGILTKHGMHHPHASVNRLYIPRKDGGRGMQNIESIHHKTVRDMREYFKSKHSPFNKALSKEDQNITPLNLASERHPIGPPNHEELSEVWHSKALHGRYPTALKKKNINREKSLAYLKAGYLFPETEGRLMAIQDQVVPTRSYQKNITGKNIASDKCRKCSQAPETIQHVTSSCSVLAPREYTDRHNAMAKVFHQAIALKYGLEQTQKKISEYLPREVQENDAVRLYWDHPLTTDRPIAHNRPDIVIFEKGKNRSIIVDITVPADDNAEKAYTEKIVKYHDLAFEMKELYRLTFIEILPLVITTNGLVETHLPENTTKLGLEERLIEDAQKEVILWTTRIVRRFLTSN

SEQ ID NO: 32450 - protein, 1167 aa, Coccinella septempunctata
MHQGGRGQRAGPLRSRPEEEPDGVSCGASGAAPRDGTVSPVRNPRRLRRSISLDRLRTRPANSPRRDGRTRWTNEENILLMRVHFIARDLQQRTDRTYREIITTTWNEINPARLLYPTLLSNRIRWILQAEKFSSVELEDIERSCRPHIPMLADDYTDVEENIQETREQPSPQLKKTTKIFNRILQLYSGVSPQERPGIPRLTGSRKIQESVERTNMIISTQLRNDSTLEEIVDCVYAGAITVCEENNKSLKGTKPEMKVEKEPPWKNRLERKITNIRKRLGTIYTYLNTASPSRKVSKKALRIASDLKIRRDQLKEKLTLECDILKQRVKALGNRLKRYNERVNRYRNNQLYYRNPKEFYRMLETSTTTTTTSKKEYPTKDHMRSTWEKIWSEDGRHDDDAHWIREAESESEKYMMESLVITESMIKKILKKTNNWSAPGPDGIHNYWWKYFGSTHKFLAKVFQKSLSDPSVLPDFCTLGVTHMIPKGKNSEDPGDYRPITCLPTVYKILTGTITQHIWKHVDKYNIMAREQNGSRKDTRGCKELLRIDKLVTKQAKRKQRNLSMAWIDYRKAFDSIPHSWLLKTLRLYGVSENVINLLQHLMKTWRTRLQVKTSKDYYRTDEINIRKGIFQGDKLSTLWFCLAINFLSKLLNESSYGYVIEKNTNVKINHLLYIDDLKLFAANEEQLLRQLKIVTSFTKTIRMELGIDKCAVVHVKRGKLSEGDTMMIQDDFGIQTLTHGDTYKYLGVQQGMEIRTNEARETFKYKFLNRFKKILQANLNAKAMNTAISSWAIPCLSYSFGVVKWTASDLKTLDIQTRKLLTRHGMHHPNASVNRLYIPRKDGGRGMQSIESIHHTVVKDMREYFRSKNLPFYKALSKEDQNITALNMASEHYTVQHPTTEELTEVWHNRALHGRYPAALKKRSIDKERSVKYLQSGYLFPTTEGRLAAIQDQVVATRSYQKNILGRNLTGDRCRKCSRAPETIQHVTSSCPVLAPREYTDRHNAMAKVFHQAISLKYGLINTSKKIHEYLPREIQENDEVKVYWDHPLTTDRPLAHNRPDIVVFKKREAKAIIVDITVPADDNAEKAYTEKVVKYQDLAFELKELYRLANIAVLPLVITTGGLIEVHLMENTTRLGLEERLIEDAQKEVILWTTRIVRRFLMSE

SEQ ID NO: 32451 - protein, 1165 aa, Adalia bipunctata
MLRGGRGQRAGPLRSRPEEEPDGVSCGASGAAPRDGTVSPIRNPIRSRRSISLDGLITRPAISPRRDGRTRWTNEENILLMRVHFIAKDLQRTTNRTYRQIITTTWNEINPAKLLYPNLLSNRIRWILQNEKFSSVELESIERSCRPHTTTPAENHTEVEANIRFSQEPDPKMKTTEKIFNKILQLYSGISPQERPAIPRLTGSQKILESVERTNSIINTQLSNDSTLEQIVDYVYAGAMTVCEENNKGLKGMRTDTRTHVEPPWKKRLEKKITNIRKRIGTIFTYLNTTSPSRKVIKRVHCIASELKIREDKLREGLSLECDVLKQKVKALGNRLKRYNERVNRYRNNQLYYRNPKEFYRSLETKANHTTSEEKYPTENNMRSTWEEIWRADGEHDDDALWIREAEEESRRYIMEDLIITEANIKKILKNTNNWSAPGPDGIHNYWWKYFSSTHKFLAKVFQESLTDPSILPDFCTLGLTHMIPKGKDTEDPRDYRPITCLPTVYKILTGTITQHIWKHVEKYNIMAQEQNGSRKDTRGCKELLIIDTLVTKQAKKKQRNISMAWIDYKKAFDSIPHSWLLKTLRLYGVAEAVINLLQHLMEKWRTRLQVKTNKNNYKTDEINIRKGIFQGDKLSTLWFCLAINFLSKLLNKSSYGYVIDKRTNIKINHLLYIDDLKLFAANEEQLLRQLKIVTSFTRTIKMELGLEKCAVIHVKRGKLSEGNTMMIEDDLGIQRLAQGDTYKYLGIQQGMEIKSNEAKESFKYKFLNRLKKTLQAKLNAKAMNTAISSWVIPCLSYSFGVLRWTASDLKQLDIQVRALLTRHGMHHPHASVNRLYIPRKDGGRGMQSIEGIHHNVIRDMREYFKSKNLPFYKALSKEDQNITALNLATEHHLLQSPTNEELSEVWHGKALHGRYPEALKKRSIDKERSIAYLKSGYLFPETEGRLAAIQDQVVPTRSYQKNITGRNLRSDKCRKCSQAPETIQHVTSSCPVLAPREYTDRHNAMARVFHQAISLKYGLIKIKKKIHEYSPREVQENDEVKVYWDHPLITDRPIAHNRPDIVIFKKRERGAFVVDITVPADDNVEKAYTEKIVKYQDLAFELKELYRLTQITILPLVITTNGLVEIHLQENTKKLGLEERLIEDAQREVILWTTRIVRRFLLSE

SEQ ID NO: 32452 - protein, 1260 aa, Coccinella septempunctata
MYMLFPYVQNVLELNVRHIYIYIYIYIYIYIYIYIYIYIYIYIYIYIYIYIYIYIYAGKRKLSGIDGPAYPSHPVPKVSSLGTDEKVAPITRSMHQGGRGQRAGPLRSRPEEEPDGVSCGASGAAPRDGTVSPVRNPRRLRRSISLDRLRTRPANSPRRDGRTRWTNEENILLMRVHFIARDLQQRTDRTYREIITTTWNEINPARLLYPTLLSNRIRWILQAEKFSSVELEDIERSCRPHIPMLADDYTDVEENIQETREQPSPQLKKTTKIFNRILQLYSGVSPQERPGIPRLTGSRKIQESVERTNMIISTQLRNDSTLEEIVDCVYAGAITVCEENNKSLKGTKPEMKVEKEPPWKNRLERKITNIRKRLGTIYTYLNTASPSRKVSKKALRIASDLKIRRDQLKEKLTLECDILKQRVKALGNRLKRYNERVNRYRNNQLYYRNPKEFYRMLETSTTTTTTSKKEYPTKDHMRSTWEKIWSEDGRHDDDAHWIREAESESEKYMMESLVITESMIKKILKKTNNWSAPGPDGIHNYWWKYFGSTHKFLAKVFQKSLSDPSVLPDFCTLGVTHMIPKGKNSEDPGDYRPITCLATVYKILTGTITQHIWKHVDKYNIMAREQNGSRKDTRGCKELLIIDTLVTKQAKRKQRNLSMAWIDYRKAFDSIPHSWLLKTLRIYGVSENVINLLQHLMKTWRTRLQVKTSKDYYRTDEMNIRKGIFQGDKLSTLWFCLAINFLSKLLNESSYGYVIEKNTNVKINHLLYIDDLKLFAANEEQLLRQLKIVTSFTKTIRMELGIDKCAVVHVKRGKLSEGDTMMIQDDFGIQTLTHGDTYKYLGVQQGMEIRTNEARETFKYKFLNRFKKILQANLNAKAMNTAISSWAIPCLSYSFGVVKWTASDLKTLDIQTRKLLTRHGMHHPNASVNRLYIPRKDGGRGMQSIESIHHTVVKDMREYFRSKNLPFYKALSKEDQNITALNMASEHYTVQHPTTEELTEVWHNRALHGRYPAALKKRSIDKERSVKYLQSGYLFPTTEGRLAAIQDQVVATRSYQKNILGRNLTGDRCRKCSRAPETIQHVTSSCPVLAPREYTDRHNAMAKVFHQAISLKYGLINTSKKIHEYLPREIQENDEVKVYWDHPLTTDRPLAHNRPDIVVFKKREAKAIIVDITVPADDNAEKAYTEKVVKYQDLAFELKELYRLANIAVLPLVITTGGLIEVHLMENTTRLGLEERLIEDAQKEVILWTTRIVRRFLMSE

SEQ ID NO: 32453 - protein, 1239 aa, Coccinella septempunctata
MIIFNFHTFAVALEYIYIYIYIYIYIYIYIYIYIYAGKRKLSGIDGPAYPSHPVPKVSSLGTDEKVAPITRSMHQGGRGQRAGPLRSRPEEEPDGVSCGASGAAPRDGTVSPVRNPRRLRRSISLDRLRTRPANSPRRDGRTRWTNEENILLMRVHFIARDLQQRTDRTYREIITTTWNEINPARLLYPTLLSNRIRWILQAEKFSSVELEDIERSCRPHIPMLADDYTDVEENIQETREQPSPQLKKTTKIFNRILQLYSGVSPQERPGIPRLTGSRKIQESVERTNMIISTQLRNDSTLEEIVDCVYAGAITVCEENNKSLKGTKPEMKVEKEPPWKNRLERKITNIRKRLGTIYTYLNTASPSRKVSKKALRIASDLKIRRDQLKEKLTLECDILKQRVKALGNRLKRYNERVNRYRNNQLYYRNPKEFYRMLETSTTTTTTSKKEYPTKDHMRSTWEKIWSEDGRHDDDAHWIREAESESEKYMMESLVITESMIKKILKKTNNWSAPGPDGIHNYWWKYFGSTHKFLAKVFQKSLSDPSVLPDFCTLGVTHMIPKGKNSEDPGDYRPITCLPTVYKILTGTITQHIWKHVDKYNIMTREQNGSRKDTRGCKELLIIDTLVTKQAKRKQRNLSMAWIDYRKAFDSIPHSWLLKTLRLYGVSENVINLLQHLMKTWRTRLQVKTSKDYYRTDEINIRKGIFQGDKLSTLWFCLAINFLSKLLNESSYGYVIEKNTNVKINHLLYIDDLKLFAANEEQLLRQLKIVTTFTKTIRMELGIDKCAVVHVKRGKLSEGDTMMIQDDFGIQTLTHGDTYKYLGVQQGMEIRTNEARETFKYKFLNRFKKILQANLNAKAMNTAISSWAIPCLSYSFGVVKWTASDLKTLDIQTRKLLTRHGMHHPNASVNRLYIPRKDGGRGMQSIESIHHTVVKDMREYFRSKNLPFYKALSKEDQNITALNMASEHYTVQHPTTEELTEVWHNRALHGRYPAALKKRSIDKERSVKYLQSGYLFPTTEGRLAAIQDQVVATRSYQKNILGRNLTGDRCRKCSRAPETIQHVTSSCPVLAPREYTDRHNAMAKVFHQAISLKYGLINTSKKIHEYLPREIQENDEVKVYWDHPLTTDRPLAHNRPDIVVFKKREAKAIIVDITVPADDNAEKAYTEKVVKYQDLAFELKELYRLANITILPLVITTGGLIEVHLMENTTRLGLEERLIEDAQKEVILWTTRIVRRFLMSE

SEQ ID NO: 32454 - protein, 1165 aa, Adalia bipunctata
MCQGGRGQRTGPLRSRPEEESDGVNCGASGAAPRDGTVSPILNAPRRPRRSISLDRTRIRPAEPLRRDGRTRWTDEENILLMRVHFIARDLQQETDRRYRGILTTTWNEINPGKLSYPNLLSNRVRWILQTEKFSSVELENIERSCRPHAPTQVENNTENEENNTETQRQPNTQIKKTEKIFKKNLQLYTGISPKERPGIPRLKGSRKNLESVERANYEIGLLVDYNSTIEDIVDYVYAGAVTVCEENNIGCKGKKQETETEREPPWKIRLEKKIINIRKQIGTLYTYLNAASPSRRVIKKALRIASEYKIRNEQLREQLILRCDILKQKAKALGNRLKRYNERVKRHRNNQMYYKNPKQFYRTLEETTTTTEKRYPTKESMQSTWKEIWSEVGEHDDDAFWIREAENESSGYIMEEVNITEENIKAVLKKTNNWSAPGPDGIHNYWWKYFDSTHRFLAKVFQKALTNPSLIPDFCTLGVTHMLPMGTNSENPRNYRPITCLPTIYKILTGTITQQISNHVGKYNIMAQEQNGCRKDARGCKEMLIIDSLITKQAKKKQRNLSMAWIDYKKAFDSIPHSWLLKTLKLYGVSEVVINLLQHLMKTWRTKLQVKTDRNIYTTDEIKIKRGIFQGDKMSTLWFCLAVNFLSKLLNKSTYGYVIEKRNNTKINHLLYIDDLKLFAANEDQLLRQMKIVTSFTKTVKMEIGLDKCAVIHVKRGKLSEGDAMIVEDDLAIRRLGPDETYRYLGVQQGMEIKTAEAKEIFKNKFLIRLRKILQAKLNAKSMNTAINTWALPCLTYSFGVIKWSTADIKALDIKVRGTLTKHGMHHPHASVNRLYIPRKDGGRGMQNIESIHHKTVRDMREYFKSKHSPFYKALSKEDQNITPLNLASERHPIGPPNHEELSEVWHSKALHGRYPTALKKKNINREKSLAYLKAGYLFPETEGRLMAIQDQVVPTRSYQKNITGKNIASDKCRKCSQAPETIQHVTSSCSVLAPREYTDRHNAMAKVFHQAIALKYGLVQTQKKISEYLPREVQENDAVRLYWDHPLTTDRPIAHNRPDIVIFEKGKNRSIIVDITVPADDNAEKAYTEKIVKYHDLAFEMKELYRLTFIEILPLVITTNGLVETHLPENTTKLGLEERLIEDAQKEVILWTTRIVRRFLTSN

SEQ ID NO: 32455 - protein, 1166 aa, Coccinella septempunctata
MLKGGRGQRAGPLRSRPEEEPDGVSCGASGAAPRDGTVSPIQNPRRSRRSISLDGLGTRPADSSRRDGRTRWTNEENILLMRVHFIAKDLQERTNRTYREIITTTWNEINPAKLLYPDLLSNRIRWILQTEKFSSVELESIKRSCRPHTPTPAEDHMEAENNIQGTREQPDPKMKNTKKIFNKFLQLFSGISPQERPGIPRLTGSQKILESVERTNNIISTQLNNDSTFEQIVDCVYAGAATVCEENNKGVRRAKPDTNTQEEPPWKKRLEKKINNIRKRIGTIYTYLNTASPSRKVIKKALRMASDLNIRKDRLKEGLTLECDVLKQKVKVLGNRLKRYNERVNRYRNNQLYYRNPKEFYRSLETAAGPTTSGESCPTKDSMRSTWEEIWSKDGEHDDEALWIREAEEESRMYIMEDLLITEENIKKVLKKTNNWSAPGPDGIHNYWWKYFSSTHKFLARVFQKSLTDPSILPASCTLGVTHMIPKGKNTKDPRDYRPITCLPTVYKILTGTITQHIWKHVDRYNIMAREQNGSRKDARGCKELLIIDTLVTKQAKKKQRNISMAWIDYRKAFDSIPYSWLLKTLRLYGVSEAVINLLQHLMEMWRTRLQVKTNKSNYKTGEINIRKGIFQGDKLSTLWFCLAINFLSKLLNKSAYGYVIEKSTNTKINHLLYIDDLKLYAANEEQLLRQLKIVTSFTKTIKMELGLDKCAVIHVKRGKLSEGSTMMIQDNLGIQRLAPGDTYKYLGIQQGMEIRANEAKESFKYKFLNRLKKILQAKLNAKAMNIAISSWVIPCLSYSFGVIKWTASDLGALDIQVRRLLTRHGMHHPHASVNRLYIPRKDGGRGMQSIESIHHNTVREMREYFRSKNLQFYKALSKEDQNITALNLASEHHLHQTPTSEELSEVWHSKALHGRYPAALKKRSIDKERSLAYLKSGYLFPETEGRLAAIQDQVVPTRSYQKNITGRNLISDRCRKCSQAPETIQHVTSSCPVLAPREYTDRHNAMAKVFHQAISLKYGLVSTKKKIHEYSPREVQENDAVKVYWDHPLTTDRPIAHNRPDIVVFKKREGTAIIVDITVPADDNAEKAYTEKVVKYQDLAFELKELYRFTNITILPLVITTNGLVEIHLQENTRRLGLEGKEIEDAQKEVILWTTRIVRRFLVSE

SEQ ID NO: 32456 - protein, 1199 aa, Coccinella septempunctata
MNLTEVAAHYGFIYIYIYIYIYIYIYIYIYIYIYIYIYIYIYIYIYIYIYIYIYIYISCGASGAAPRDGTVSPIQNPRRSRRSISLDGLGTRPADSSRRDGRTRWTNEENILLMRVHFIAKDLQERTNRTYREIITTTWNEINPAKLLYPDLLSNRIRWILQTEKFSSVELESIKRSCRPHTPTPAEDHMEAENNIQGTREQPDPKMKNTKKIFNKFLQLYSGISPQERPGIPRLTGSQKILESVERTNNIISTQLNNDSTFEQIVDCVYAGAATVCEENNKGVRRAKPDTNTQEEPPWKKRLEKKINNIRKRIGTIYTYLNTASPSRKVIKKALRMASDLNIRKDRLKEGLTLKCDVLKQKVKVLGNRLKRYNERVNRYRNNQLYYRNPKEFYRSLETAAGPTTSGESCPTKDSMRSTWEEIWSKDGEHDDGALWIREAEEESRMYIMEDLLITEENIKKVLKKTNNWSAPGPDGIHNYWWKYFSSTHKFLARVFQKSLTNPSILPASCTLGVTHMIPKGKNTKDPRDYRPITCLPTVYKILTGTITQHIWKHVDRYNIMAREQNGSRKDARGCKELLIIDTLVTKQAKKKQRNISMAWIDYRKAFDSIPHSWLLKTLRLYGVSEAVINLLQHLMEMWRTRLQVKTNKSNYKTGEINIRKGIFQGDKLSTLWFCLAINFLSKLLNKSAYGYVIEKSTNTKINHLLYIDDLKLYAANEEQLLRQLKIVTSFTKTIKMELGLDKCAVIHVKRGKLSEGSTMMIQDNLGIQRLAPGDTYKYLGIQQGMEIRANEAKESFKYKFLNRLKKILQAKLNAKAMNIAISSWVIPCLSYSFGVIKWTASDLGALDIQVRRLLTRHGMHHPHASVNRLYIPRKDGGRGMQSIESIHHNTVRDMREYFRSKNLQFYKALSKEDQNITALNLASEHHLHQTPTSEELSEVWHSKALHGRYPAALKKRSIDKERSLAYLKSGYLFPETEGRLAAIQDQVVPTRSYQKNITGRNLISDRCRKCSQAPETIQHVTSSCPVLAPREYTDRHNAMAKVFHQAISLKYGLVSTKKKIHEYSPREVQENDAVKVYWDHPLTTDRPIAHNRPDIVVFKKKEGTAIIVDITVPADDNAEKAYTEKVVKYQDLAFELKELYRFTNITILPLVITTNGLVEIHLQENTRRLGLEGKEIEDAQKEVILWTTRIVRRFLVSE

SEQ ID NO: 32457 - protein, 951 aa, Coccinella septempunctata
MIISTQLRNDSTLEEIVDCVYAGAITVCEENNKSLKGTKPEMKVEKEPPWKNRLERKITNIRKRLGTIYTYLNTASPSRKVSKKALRIASDLKIRRDQLKEKLTLECDILKQRVKALGNRLKRYNERVNRYRNNQLYYRNPKEFYRMLETSTTTTTTSKKEYPTKDHMRSTWEKIWSEDGRHDDGAHWIREAESESEKYMMESLVITESMIKKILKKTNNWSAPGPDGIHNYWWKYFGSTHKFLAKVFQKSLSDPSVLPDFCTLGVTHMIPKGKNSEDPGDYRPITCLPTVYKILTGTITQHIWKHVDKYNIMAREQNGSRKDTRGCKELLIIDTLVTKQAKRKQRNLSMAWIDYRKAFDSIPHSWLLKTLRLYGVSENVINLLQHLMKTWRTRLQVKTSKDYYRTDEINIRKGIFQGDKLSTLWFCLAINFLSKLLNESSYGYVIEKNTNVKINHLLYIDDLKLFAANEEQLLRQLKIVTSFTKTIRMELGIDKCAVVHVKRGKLSEGDTMMIQDDFGIQTLTHGDTYKYLGVQQGMEIRTNEARETFKYKFLNRFKKILQANLNAKAMNTAISSWAIPCLSYSFGVVKWTASDLKTLDIQTRKLLTRHGMHHPNASVNRLYIPRKDGGRGMQSIESIHHTVVKDMREYFRSKNSPFYRALSKEDQNITALNMASEHYTVQHPTTEELTEVWHNRALHGRYPAALKRRSIDKERSVKYLQSGYLFPTTEGRLAAIQDQVVATRSYQKNILGRNLTGDRCRKCSRAPETIQHVTSSCPVLAPREYTDRHNAMAKVFHQAISLKYGLINTSKKIHEYLPREIQENDEVKVYWDHPLTTDRPLAHNRPDIVVFKKREAKAIIVDITVPADDNAEKAYTEKVVKYQDLAFELKELYRLANITILPLVITTGGLIEVHLMENTTRLGLEERLIEDAQKEVILWTTRIVGRFLMSE

SEQ ID NO: 32458 - protein, 945 aa, Coccinella septempunctata
MHINNNSTLEDIVDFVYAGAVTVCEENNMEQKTKKPEMERQKDPPWKARLEKKIDNIRKRIGTLHTYLNTASPSRKVVKRALRITSVSNISGEQLKDRLTVECDILKQKAKALGNRLRRYNERVKRYRNNHLFYKNPKQFYRTLETTTTTTSEKKHPTKESIQSTWEEIWSKSEEHDDGAFWIREAEEESSGYIMEEENITEQDIRTVLKKTNNWSAPGPDSIHNYWWEYFTSTHTSLAKVFQKALSKPSLIPDFCTLGVTHMIPKGTNSEDPKDYRPITCLPTVYKILTGIITKKIWKHVEKYKIMAQEQNGCRKDARGCEELLIIDTLITKQAKKKQRNLSMAWVDYKKAFDSIPHSWLLKTLKLYGVSKAIVNLLRHLMDTWRTRLHVKTHSGNYATGEINIRRGIFQGDKLSTLWFCLAINFLSKLLNKSTYGYVIEKRNNTKINHLLYIDDLKLFAANEDQLLRQLKIVTSFTKTIKMELGLEKCAVIHVKREKMTGGDMMRIQNYLSIKILQPEDTYKYLGIQQGMEINTTEAREAFKHKFFNRLKKVLQAKLNAKAMNTAISTWAIPFLSYSFGIVKWTKTDLKALDIQVRGLLTRHGMHHPHASVNRLYIPRNKGGRGMQNIETIHHNTVKDMREYFKSKHLPFYKALSREDQGITALNLASEHHLAEPSTIEELCEEWHGKALHGRYPTVLKNRNIDAERSLSYLKAGYLFPETEGRLAAIQDQVVPTREYQKNITGRNIPSDRCRKCSQAPESIQHVTSSCPVLAPREYTDRHNAMAKVFHQAIALKYGLLKTERKIHEYLPEQVQENDAVRVYWDHPLITDRPIAHNRSDIVVLEKMENRVTIIDITVPADDNVEKAYAEKMFKYHDLAFELKELYRLTHITILPLVITTNGLVEMHLAGNTAKLGLHEDLIEKAQKEVILWTTRIVRSFLTSN

SEQ ID NO: 32459 - protein, 1165 aa, Adalia bipunctata
MCQGGRGQRTGPLRSRPEEESDGVNCGASGAAPRDGTVSPILNAPRRPRRSISLDGTRTRPAELLRRDGRTRWTDEENILLMRVHFIARDLQQETDRRYREILTTTWNEINPGKLSYPNLLSNRVRWILQTEKFSSVELENIERSCRPHAPTQVENNTENEENNTETQRQPNTQIKKTEKIFKKNLQLYTGISPKERPGIPRLKGSRKILESVERANYEIGLLVDYNSTIEDIVDYVYAGAVTVCEENNIGCKGKKQETETEREPPWKIRLEKKIINIRKQIGTLYTYLNAASPSRRVIKKALRIASEYKIRNEQLREQLILRCDILKQKAKALGNRLKRYNERVKRHRNNQMYYKNPKQFYRTLEETTTTTEKRYPTKESMQSTWKEIWSEVGEHDDDAFWIREAEDESSGYIMEEVNITEENIKAVLKKTNNWSAPGPDGIHNYWWKYFDSTHRFLAKVFQKALTNPSLIPDFCTLGVTHMLPKGTNSENPRNYRPITCLPTIYKILTGTITQQISKHVGKYNIMAQEQNGCRKDARGCKEMLIIDSLITKQAKKKQRNLSMAWIDYKKAFDSIPHSWLLKTLKLYGVSEVVINLLQHLMKTWRTKLQVKTDRNIYTTDEIKIKRGIFQGDKLSTLWFCLAVNFLSKLLNKSTYGYVIEKRNNTKINHLLYIDDLKLFAANEDQLLRQIKIVTSFTKTVKMEIGLDKCAVIHVKRGKLSEGDAMIVEDDLAIRRLGPDETYRYLGVQQGMEIKTAEAKEIFKNKFLIRLRKILQAKLNAKSMNTAINTWALPCLTYSFGVIKWSTADIKALDIKVRGILTKHGMHHPHASVNRLYIPRKDGGRGMQNIESIHHKTVRDMREYFKSKHSPFNKALSKEDQNITPLNLASERHPIGPPNHEELSEVWHSKALHGRYPTALKKKNINREKSLAYLKAGYLFPETEGRLMAIQDQVVPTRSYQKNITGKNIASDKCRKCSQAPETIQHVTSSCSVLAPREYTDRHNAMAKVFHQAIALKYGLEQTQKKISEYLPREVQENDAVRLYWDHPLTTDRPIAHNRPDIVIFEKGKNRSIIVDITVPADDNAEKAYTEKIVKHHDLAFEMKELYRLTFIEILPLVITTNGLVETHLPENTTKLGLEERLIEDAQKEVILWTTRIVRRFLTSN

SEQ ID NO: 32460 - protein, 1166 aa, Harmonia axyridis
MNQGGRGQRAGPLRSRPEVEPDGDSCGASGAAPHDGTVSPDSNRMRRPRRSTSLDGIRNRSAELTRRDGRTRWTEKENILLMRVHYIAEDLQQTSNRTYREILTTTWNDINPNKISYPNLLSNRVRWILQNAKFSSVELANIKRSYRPHTPTPTQDLTETEEVNRENQHQQNPQIKNTSKVFNRYLQLYSKISPQDRPGIPRLRGSRKIFESVERTNEVIRMHINNNSTLEDIVDFVYAGAITVCEENNIGRKTKKRETETQKDPPWKARLEKKINGIRKRIGTLHTYLNTTSPSRKVIKRALHIASVSNISREQLKDRLTVECDILKQKAKALGNRLRRYNERVKRYRNNNLFYKNPKQFYRTLETTTTTTSEQKHPTKESIQSTWEEIWSRNEEHDDDAFWIREAEEESSGYIMEEENITEQDIKTVLKKTNNWSAPGPDGLHNYWWKYFTSTHTCLATVFQKALSKPSLIPDFCTLGVTHMIPKGTNSEDPKDYRPITCLPTVYKILTGIITKKIWKHVGKYKIMAQEQNGCRKDARGCKELLIIDTLITKQAKKKQRNLSMAWIDYKKAFDSIPHSWLLKTLKLYGVSKAIINLLKHLMDTWRTRLHVKTNSSNYTTDEVNIRRGIFQGDKLSTLWFCLAINFLSKLLNKSSYGYVIEKRNNTKINHLLYIDDLKLFAANEDQLLRQLKIVTSFTKTIKMELGLKKCAAVHVKRGKISGGDMMRIQDDLSIKILQPEDTYKYLGIQQGMEIRTTEAREAFKHKFFNRLKKVLQAKLNAKAMNTAISTWAIPSLSYSFGIVKWTTTDLRALDIQVRGLLTRHGIHHPHASVNRLYIPRNKGGRGMQNIETIHHNIVKDMREYFKSKHLPFHKALSREDQGITALNLASEHHPAEPPTIEELCEDWHGRALHGRYPTVLKNRDIDTERSLSYLKAGYLFPETEGRLAAIQDQVVPTRAYQKNITGRNLPSDKCRKCSQAPETIQHVTSSCPALAPREYTDRHNSMAKVFHQAIALKYGLLKTERKIHEYLPKQVQENDAVKVYWDHPLITDRPIAHNRPDIVILEKMENRATIVDITVPADDNAEKAYTEKIIKYHDLAFELKELYRLTHITILPLVITTNGLVEMHLTGNTAKLGLHEDLIEKAQKEVILWTTRIVRSFLTSN

SEQ ID NO: 32461 - protein, 1045 aa, Harmonia axyridis
MRVHYIAEDLQQTSNRTYREILTTTWNDINPNKISYPNLLSNRVRWILQNSKFSSVELANIKRSYRPHTPTPTQDLTETEEVNRENQHQQNPQIKNTSKVFNRNLQLYSKISPQDRPGIPRLRGSRKIFESVGRTNEVIRMHINNNSTLEDIVDFVYAGAITVCEENNIGRKTKKRETETQKDPPWKARLEKKINGIRKRIGTLHTYLNTASPSRKVIKRALHIASVSNISREQIKDRLTVECDILKQKAKALGNRLRRYNERVKRYRNNNLFYKNPKQFYRTLETTTTTTSEQKHPTKESIQSTWEEIWSRNEEHDDDAFWIREAEEEASGYIMEEENITEQDIKTVLKKTNNWSAPGPDGLHNYWWKYFTSTHTCLATVFQKALSKPSLIPDFCTLGVTHMIPKGTNSEDPKDYRPITCLPTVYKILTGIITKKIWKHVGKYKIMAQEQNGCRKDARGCKELLIIDTLITKQAKKKQRNLSMAWIDYKKAFDSIPHSWLLKTLKLYGVSEAIINLLKHLMDTWRTRLHIKTNCSNYTTDEVNIRRGIFQGDKLSTLWFCLAINFLSKLLNNSSYGYVIEKRNNTKINHLLYIDDLKLFAANEDQLLRQLKIVTSFTKTIKMELGLKKCAAIHVKRGKISGGDMMRIQDDLSIKILQPEDTYKYLGIQQGMEIRTTEAREAFKHKFFNRLKKVLQAKLNAKAMNTAISTWAIPSLSYSFGIVKWTTTDLRALDIQVRGLLTRHGMHHPHASVNRLYIPRNKGGRGMQNIETIHHNIVKDMREYFKSKHLPFYKALSREDQGITALNLASEHHPAESPTIEELCEDWHGRALHGRYPTVLKNRDIDTERSLSYLKAGYLFPETEGRLAAIQDQVVPTRAYQKNITGRNLPSDKCRKCSQAPETIQHVTSSCPALAPREYTDRHNAMAKVFHQAIALKYGLLKTERKIHEYLPKQVQENDAVKVYWDHPLITDRPIAHNRPDIVILEKMENRATIVDITVPADDNTEKAYTEKIIKYHDLAFELKELYRLTHITILPLVIIVEWAG

SEQ ID NO: 32462 - protein, 1200 aa, Coccinella septempunctata
MLSGSDDPAYLSHPAPRLAAWEAVDYEAPVTRSMMQGGRGQRAGPLRSRLEAEPVGDSCGASGAAPRDGTVSHSSNNIRRVRRSISLDGIRNRPAEAQTRDGRMRWTEEENILIMRVHFIAEELHQQNAERTYRQILTTTWNEIYPSRLSYPNLLANRVKWIIQNEKFSSVELESIKKSIRPYAPVSTDDTIITEEINHEQQVSTTLEHKSTEKVFRRNIQLYAKINPQERPRIPRLKGSQNILESVSRTNKIMETILPSNLNIEEIADYVYAGAVTVCEENNIRLIINKHRTEENKMPPWKIRLEKKIERIRANIGVLYTYLNSNSPSRKTIKKISRIASDYKIKTTNEPFKQELIVVYDTLKQKAQALGNRIRRYNERVKRYKNNQLYYKNQNQFYRQLEETTTVEEELPKPDEMRTTWEAIWSDGGEHNDGASWIREAEEESKYYIMDRVTITENDIRATLKKTNNWSAPGPDGLHNYWWKHFSCTHKQITKLFQQALVNPSQLPHTLTLGITHMIPKGPGHNNPKNYRPITCLPVIYKILTGVITQKIWNHVRTCNILAPEQNGCRRDAKGSKELLIIDSLITKQAKKKQRNLSMAWIDYRKAFDSIPHSWLLKTLRLYGVEEAIINLLKHLMLTWRTRLHLKTNTGEYTTEQINIRRGLFQGDKLSTLWFCLAINFLSKLLNNTRYGYIIEKRNNTKISHQLYIDDLKLYAANEDQLLKQLRIVTSFTENIKMELGLDKCAVLHMKRGKLIEGEAMLINQGLEMQRMGPEDTYKYLGIKQGLEIRTKEAKDAFKTKFMERLKKVLQSKLNAKSTFTAIKAWAMPCLTYSFGIIKWSTTDLRAIDTQVRVLLTRYGMHHPHASVIRLHMPRSEGGRGLQQVENTHNTVVKQMTEYFESKNSPFFRAIAEEDQNITALNLASTTPPIESPNIEEAAREWHGKALHGRYPTALKWNKINKEKSISYLKAGYLFPETEGRLAAIQDQVIPTRAYLKNIARKNLPTDLCRRCSQSVETIQHITSSCSTLAPREYTDRHNAMAKVYHQALAIKHGLLKQHKKVYEYSPQTLLENANLKLYWDHPLITDRPISHNRPDIVIFDKKEKTAIIIDITVPADDNAEKAYIEKIVKYHDLAFELKQIHQLTSTLILPLVITTNGLVEMHLIQHTKRLGLDESLIDVAQKEVILWTTRIVRRFLTSS

SEQ ID NO: 32463 - protein, 1167 aa, Coccinella septempunctata
MMQGGRGQRAGPLRSRLEAEPVGDSCGASGAAPRDGTVSHSSNNIRRVRRSISLDGIRNRPAEAQTRDGRMRWTEEENILIMRVHFIAEELHQQNAERTYRQILTTTWNEIYPSRLSYPNLLANRVRWIIQNEKFSSVELESIKKSIRPYAPVSTDDTIITEEIDHEQQVSTTLEHKSTEKVFRRNIQLYAKINPQERPRIPRLKGSQNILESVSRTNKIMETILPSNLNIEEIADYVYAGAVTVCEENNIRLIINKHRTEENKMPPWKIRLEKKIERIRANIGVLYTYLNSNSPSRKTIKKISRIASDYKIRATNEPFKQELIVVYDTLKQKAKALGNRIRRYNERVKRYKNNQLYYKNQNQFYRQLEETTTVEEELPKPDEMRTTWEAIWSDGGEHNDGASWIREAEEESKYYIMDRVTITENDIRATLKKTNNWSAPGPDGLHNYWWKHFSCTHKQITKLFQQALVNPSQLPHTLTLGITHMIPKGPGHNNPKNYRPITCLPVIYKILTGVITQKIWNHVRTCNILAPEQNGCRRDAKGSKELLIIDSLITKQAKKKQRNLSMAWIDYRKAFDSIPHSWLLKTLRLYGVEEAIINLLKHLMLTWRTRLHLKTNTGEYTTEQINIRRGLFQGDKLSTLWFCLAINFLSKLLNNTRYGYIIEKRNNTKISHQLYIDDLKLYAANEDQLLKQLRIVTSFTESIKMELGLDKCAVLHMKRGKLIEGEAMLINQGLEMQRMGPEDTYKYLGIKQGLEIRTRETKDAFKTKFMERLKKVLQSKLNAKSTFTAIKAWAMPCLTYSFGIIKWSTTDLRAIDTQVRVLLTRYGMHHPHASVIRLHMPRSEGGRGLQQVENTHNTVVKQMKEYFKSKNSPFFQAIAEEDQNITALNLASTTPPIESPNIEEAAREWHGKALHGRYPTALKWNKINKEKSISYLKAGYLFPETEGRLAAIQDQVIPTRAYLKNMARKNLPTDLCRKCSQSVETIQHITSSCSTLAPREYTDRHNAMAKVYHQALAIKHGLLKQHKKGYEYSPQTLLENANLKLYWDHPLITDRPISHNRPDIVIFEKKEKTAIIIDITVPADDNAEKAYIEKIVKYHDLAFELKQIHQLTSTLILPLVITTNGLVEMHLIQHTKRLGLDESLIDVAQKEVILWTTRIVRRFLTSS

SEQ ID NO: 32464 - protein, 891 aa, Coccinella septempunctata
MCETKKKKKKKKKKKKKKYIYMYIYIYIYIYIYIYIYIYNEPFKQELIVVYDTLKQKAQALGNRIRRYNERVKRYKNNQLYYKNQNQFYRQLEETTTVEEELPKPDEMRTTWEAIWSDGGEHNDGASWIREAEEESKYYIMDRVTITENDIRATLKKTNNWSAPGPDGLHNYWWKHFSCTHKQITKLFQQALVNPSQLPHTLTLGITHMIPKGPGHNNPKNYRPITCLPVIYKILTGVITQKIWNHVRTCNILAPEQNGCRRDAKGSKELLIIDSLITKQAKKKQRNLSMAWIDYRKAFDSIPHSWLLKTLRLYGVEEAIINLLKHLMLTWRTRLHLKTNTGEYTTEQINIRRGLFQGDKLSTLWFCLAINFLSKLLNNTRYGYIIEKRNNTKISHQHYIDDLKLYAANEDQLLKQLRIVTSFTENIKMELGLDKCAVLHMKRGKLIEGEAMLINQGLEMQRMGPEDTYKYLGIKQGLEIRTKEAKDAFKTKFMERLKKVLQSKLNAKSTFTAIKAWAMPCLTYSFGIIKWSTTDLRAIDTQVRVLLTRYGMHHPHASVIRLHMPRSEGGRGLQQVENTHNTVVKQMTEYFKSKNSPFFRAIAEEDQNITALNLASTTPPIESPNIEEAAREWHGKALHGRYPTALKWNKINKEKSISYLKAGYLFPETEGRLAAIQDQVIPTRAYLKNIARKNLPTDLCRRCSQSVETIQHISSSCSTLAPREYTDRHNAMAKVYHQALAIKHGLLKQHKKVYEYSPQTLLENANLKLYWDHPLITDRPISHNRPDIVIFDKKEKTAIIIDITVPADDNAEKAYIEKIVKYHDLAFELKQIHQLTSTLILPLVITTNGLVEMHLIQHTKRLGLDESLIDVAQKEVILWTTRIVRRFLTSS

SEQ ID NO: 32465 - protein, 980 aa, Adalia bipunctata
MYAKINPHERPRIPRLKGSLKILESVRRANEIMEKIMPDNINIEEVTDYVYAGAATVCEENNVRLIVTKSRIRENRAPPWKIRLEKKKIESIRSKIGVLHTYLNSNSPSRKTTKKISCIASEHNVRGRDGPFKQKLMVIYDTLKQKAQALGNRVKRYNERVKRYKNNQLYYKNQRQFYRQLEETTTAEEDLPKPDEMRTTWEEIWSDKGEHDDGASWIREAEEESKNYVMDQVTITEDDVRATLKKTNNWSAPGPDGLHNYWWKHFSSTHKKITKLFQQALVNPSQLPNTLTLGITHMIPKGPRNNNPKNYRPITCLPVIYKILTGVITQKIWKHVGKNKILAREQNGCLKDAKGSKELLIVDSLITKQAKKKQRNISMAWIDYRKAFDSIPHSWLLKTLRLYGVSEAIINLLKYLMLTWRTRLHLNTNTGEYTTAEINIRRGLFQGDKLSTLWFCLAINFLSKLLNNTKYGYILKKINNTKINHQLYIDDLKLYAANEDQLQRQLRIVTSFTETVKMEMGLDKCAVLHVKRGKIVEGEAMLIQQGLQMKRMGPEETYKYLGIQQGLEIKTTDARDAFKTKFIERLKKVLQSKLNAKSTFTAIKAWAMPCLAYSFGVIKWSTTELRALDTQVRVLLTRYGMHHPHASVTRLYMPRNEGGRGLQKIEHTHHTVVKQMREYFQSKISPFYQAIAEEDHNITALNLASRTDLVETSNIEEITREWHGKALHGRYPTALKWNKINKEKSISYLKAGYLFPETEGRLAAIQDQVIPTRAYLKNIVKKNLPTDRCRKCSQSVETIQHVTSSCATLAPREYTDRHNAMAKVYHQAIAIKHGLLKHHKKIHEYSPQTLLENESLKLYWDHPLITDRSVLHNRPDIVIFDKKGKTATIIDITVPADDNAEKAYTEKIVKYHDLAFELKEIHQLTCTSILPLVITTNGLVEMHLTQHTTQLGLDESLIDVAQREVILWTTRIVRRFLTSS

SEQ ID NO: 32466 - protein, 1168 aa, Coccinella septempunctata
MMQGGRGQRAGPLRSRLEVEHVGVSCGASGAAPRDGTVSHSIRNIRRVRRSISLDGIRNRPAEPQTTHGRTRWTEEENILIIRVHFIAEELRQQNTEQRTYRQILTTTWNEINPSRLSYPNLLANRVRWILENEKFSSVELESIRKSVRPYAPVPTNGATITEEANPEQQVQATLEYRKTEKVLRRFIQMYAKINPHERPRIPRLKGSLKILKSVRRTNEIMKKIMPDNLNIEQVTDYVYAGAVTVCEESNVRLIVTKSRIRENRAPPWKIRLEKKIESIRSKIGVLHTYLNSNSPSRKTTKKISCIASEHNVRGRDGPFKQKLMVIYDTLKQKAQALGNRVKRYNERVKRYKNNQLYYKNQKLFYRQLEETTTAEEDFPKPDEMRTTWEEIWSDKGEHDDGASWIREAEEESKNYVMDQVTITEDDVRATLKKTCNWSAPGPDGLHNYWWKHFSSTHKMIAKLFQQALVNPSQLPNTLTLGITHMIPKGPKNNNPKDYRPITCLPVVYKILTGVITQKIWKHVGKNKILAREQNGCLKDAKGSKELLIVDSLITKQAKKKQRNISMAWIDYRKAFDSIPHSWLLKTLRLYGVSEAIINLLKYLMLTWRTRLHLNTNTGEYTTAEIKIRRGLFQGDKLSTLWFCLAINFLSKLLNNTKYGYILKKTNNTKINHQLYIDDLKLYAANEDQLRRQLRIVTSFTETVKMEMGLDKCAVLHVKRGKLVEGEAMLIQQGLQIQRMGPEETYKYLGIQQGLEIKTAAARNAFKTKVIERVKKVLQSKLNAKSTFTAIKAWAMPCLAYSCGVIKWSTTELRALDTQIRVLLTRYGMHHPHASVTRLYIPRNEGGRGLQKIEHMHHTVVKQMREYFQSKNSPFYQAIAEEDHNITALNLASRIDPVETSNIEEITREWHGKALHGRYPTALKWNKINKEKSVSYLKAGYLFPETEGRLAAIQDQVIPTRAYLKNIVKKNLPTDRCRRCSQSVETIQHVTSSCATLAPKEYTDRHNAMAKVYHQAIAIKHGLLKYHKKIHEYSPQTLLENENLKLYWDHPLITDRSVLHNRPDIVIFDKKEKTATIIDITVPADDNAEKAYTEKIVKYHDLAFELKEIHQLTCTSILPLVITTNGLVEMHLTQHTTQLGLDESLIDVAQREVILWTTRIVRRFLTSS

SEQ ID NO: 32467 - protein, 1163 aa, Coccinella septempunctata
MNQGGRGQRAGPLRSRPEVEPDGVSCGASGAAPRDGTVSQSSNVRSVRRSISLDGIRTRSADVPITRDGRTRWTIEENTLIMRVHYIAIELQATSGRTYRDLLTSTWNEINPERHSYPNLLANRVRWIMEHEKFSSVELEAIKRSIRPFAPPPSDETNYTEVEQPEIENQETTQLENLFKKNMQLYTKISPQNRPKIPRLKGSRNIHESVKEVNKIIKSTLKRNSTLEEVVDCVFAGAVTVCQENKIHITSRQPKPKEDKEPPWKQRLEKKINTIRKQIGKLHTYLNTNSPSRKTSKKVARIASEFRIKSIGERFKQDLTKLCDTLKQKVKALGNRIRRYNERSTRYKNNQLFYKNQKQFYRQLEGTTTTEEEFPTPQDMHATWKEIWGHEVEHDDEASWIREAETEAEKYAMEEITITEDDIKAVLKKSNNWTAPGPDGIHNYWWKNFDSTHEQLSKLFQKALTDPSQIPEFCTLGITHMIPKGTKNGDPTNYRPITCLPAIYKILTGTLTHHIWKHVAKNKILAREQNGCRRDARGCKELLIVDALVTKQAKKKLRNLSMGWIDYKKAFDSIPHTWLLKTLRLYGVSECLINLLNHLMATWRTNLRVNTNNGTYTTAEIKIKRGLFQGDKLSTLWFCLAINFLSKLLNKTRYGYLIEKRNNIKINHQLYIDDLKLYAANEDQLLRQLRIVKSFTETIKMQMGLDKCAVLHIKRGKLITGEAMLVEDELRIQRLGPDESYKYLGIQQGLEIRNTEAKTTFRNKFMERLKMILKSKLNAKSTFTAISTWAIPCLSYSFGIIKWSVTDLRTIDTQIRVSLTKYGMHHPHASVSRLYVPRQDGGRGLQNIESTHHRVVREMREYFRSKNSPFFKAISDEDNNITALNLASSNHPIEPKSIEELSEIWHGKALHGRYPTALKWNKIDKVRSVNYLKAGYLFPETEGRLAAIQDQVIPTKAYQKQIMNKNLPNDKCRKCSQATETIQHITSSCPILAPREYTDRHNAMAKAYHQAIALKNGLIKHQKKIFEYLPKEILENEEMKLYWDHPLVTDRPIAHNRPDIVILKKKKKELIIIDITIPADDNAERAYNEKKIKYHDLAFELKEIYRLTSTSILPLVITTNGLVEAHLFENTIKLELDEKLIGEAQKEVILWTTRIVRRFLTSC

SEQ ID NO: 32468 - protein, 984 aa, Coccinella septempunctata
MKNMRMYEKVSPQDRPRIPRLKGSRRILECVERTNSVIKSRIQDHSSIEDLIDCVYAGAITVCEENCIRLCDKEFKPKEEKIPPWRTRLERKINNIRKTIGTLHTYLNNNSPTRKIVKRVSRIASQHHIESHNEQLRQKLIILSDTLKQKIKALGNRIRRYNERVKRYKNNQLFYKNPKQFYRTLEGTSADNKTYPTPESIHTTWKEIWSYSGDHDDEAFWIKEAEAESNKYVMEQIIITGQDIKTVLKKTNNWSAPGPDAIHNYWWKYFDSTHNHLAKLFQEALKNPSIIPESCTLGITHMLPKGTNNEDPKNYRPITCLPTIYKILTGILTQKLWRHVGRYNIMAREQNGCRKDAKGCKELLIIDTIITKQAKKKQRNLSMAWIDYKKAYDSIPHSWLKKVLRLYGVSETIINLLEHLMGTWRTRLHVNTDRGDYTTEEIKIMRGIFQGDKLSTLWFCLAINLLSKLLNASKYGYVIEKRNNTRINHHLYIDDLKLYAANEEQLMRELKIVASFTETIKMEMGLDKCAVLHVKRGKLTEGEAMKVQDQITIQTLGPERTYKYLGIQQGLEIRNSEVKIIFKEKFINRLKKILQSKLNSKAMFTSISTWVVPCLAYSFGIIKWSTTDLKALDTQVRGLLTRYGIHHPNASVNRLYIPRKDGGRGLQNIETTHYNTVKEMREYFKSKDSPFFKALSAEDNNITTLNLSSNSDPPAPPSIQELSEVWQGRALHGRFPTVLKHRKIDRDRSLTYLKAGYLFPETEGRLTAIQDQVVATRAYLKNIIGKNMTTDKCRKCSQSPETIQHVTSSCSILAPREYTDRHNAMAKAYHQAIAKKHGLLETTRPIYEYLPKEILENEEVKLYWDHPLITDRSIPHNRPDIVLFEKKLKKLIIADVTIPADDNIERAYTEKIMKYHDLSFELKEIYGLTYSTILPLVITTNGLVETHLLENTMKLGLDESVIGDAQKEVILWTTRIVRRFLTSN

SEQ ID NO: 32469 - protein, 1163 aa, Coccinella septempunctata
MNQGGRGQRAGPLRSRPEVEPDGVSCGASGAAPRDGTVSQSSNVRSVRRSISLDGIRTRSADVPITRDGRTRWTIEENTLIMRVHYIAIELQATSGRTYRDLLTSTWNEINPERHSYPNLLANRVRWIMEHEKFSSVELEAIKRSIRPFAPPPSDETNYTEVEQPEIENQETTQLENLFKKNMQLYTKISPQNRPKIPRLKGSRNIHESVKEVNKIIKSTLKRNSTLEEVVDCVFGGAVTVCQENKIHITSRQPKPKEDKEPPWKQRLEKKINTIRKQIGKLHTYLNTNSPSRKTSKKVARIASEFRIKSIGERFKQDLTKLCDTLKQKVKALGNRIRRYNERSTRYKNNQLFYKNQKQFYRQLEGTTTTEEEFPTPQDMHATWKEIWGHAVEHDDEASWIREAETEAEKYAMEEITITEDDIKAVLKKSNNWTAPGPDGIHNYWWKNFDSTHEQLSKLFQKALTDPSQIPEFCTLGITHMIPKGTKNGDPTNYRPITCLPAIYKILTGTLTHHIWKHVAKNKILAREQNGCRRDARGCKELLIVDALVTKQAKKKLRNLSMGWIDYKKAFDSIPHTWLLKTLRLYGVSECLINLLNHLMATWRTNLRVNTNNGTYTTAEIKIKRGLFQGDKLSTLWFCLAINFLSKLLNKTRYGYLIEKRNNIKINHQLYIDDLKLYAANEDQLLRQLRIVKSFTETIKMQMGLDKCAVLHIKRGKLITGEAMLVEDELRIQRLGPDESYKYLGIQQGLEIRNTEAKTTFRNKFMERLKMILKSKLNAKSTFTAISTWAIPCLSYSFGIIKWSVTDLRAIDTQIRVSLTKYGMHHPHASVSRLYVPRQDGGRGLQNIESTHHRVVREMREYFRSKNSPFFKAISDEDNNITALNLASSNHPIEPKSIEELSEIWHGKALHGRYPTALKWNKIDKVRSVNYLKAGYLFPETEGRLAAIQDQVIPTKAYQKQIMNKNLPNDKCRKCSQATETIQHITSSCPILAPREYTDRHNAMAKAYHQAIALKNGLIKHQKKIFEYLPKEILENEEMKLYWDHPLVTDRPIAHNRPDIVILKKKKKELIIIDITIPADDNAERAYNEKKIKYHDLAFELKEIYRLTSTSILPLVITTNGLVEAHLFENTIKLELDEKLIGEAQKEVILWTTRIVRRFLTSC

SEQ ID NO: 32470 - protein, 1011 aa, Coccinella septempunctata
MQERYIYIYIYIYIYIYIYIYIYIYIIHKNKLMYTKVPPELRPKIPRLQGSRRIIESVEKVNAIIKSEIKYNSTLEDVLDYVYAGAITVCEENDIRINHTQPKPAENRTPPWKIRLEGKITNIRKKIGKIHTYLNTSSPTRKMAKKIAKIASEHHIRNTNEQFKEQLTVVNDILKQKAKALGNRIKRYNERVTRYKNNQLYYKNQKQFYRQLEGIKKTEEEFPTPESMHKTWEKIWSSSGEHNDEASWIREAEAESDKYNMEQINITENDIKTALKKTNNWSAPGPDAVHNYWWKYFDSTHKRLAEIFQRALTDPTCIPETCTLGISHMIPKGAKNGDPTNYRPITCLPVIYKILTGIVTQKIWDHVAKNSILAREQNGCRRDVKGCKELLIIDSLITKQAKKKLRSLSMAWIDYKKAFDSIPHSWLLKTLELYGVSEAVVNLLKHLMGTWRTKLHVNTNEGDYTTAEIKIKRGLFQGDKLSTLWFCLAINHLSILLNRSRYGYIVEKRNNIKINHQLYIDDLKLYAANEDQLLRQLKIVASFTETIKMEMGLDKCAVLHMKRGKLISGEAMLVQDELQIQRLGPKETYKYLGIQQGLEINTAETKTAFKNKLISRIKKILQSKLNAKPTFTSISTWAIPCLSYSFGIVKWSTTDLKAIDTQIRVLLTKYGMHHPNASTNRLYIPRKDGGRGLENVEITHHRVVKEMREYFKSKNSPFFRTLCEEDNNITALNLASRNLPAEPPNISELSKIWHGKALHGRYPNALKRNRIDKERSVKYLKAGYLFPETEGRLAAIQDQVVPTRAYQKNILNKNLPSDKCRKCSQAAETIQHVTSSCPILAPREYTDRHNAMAKAYHQAIALKKGLIKQQKKIHEYIPKEILENDEVKLYWDHPLITDRPIPHNRPDIVLILKTEKKLIIIDITVPADDNAERAYTEKILKYHDLAFELKEIYKLTSTSILPLVITTNGLVEAHMLESTIELKLDEHLIEEAQKQVILWTTRIVRRFLTSS

SEQ ID NO: 32471 - protein, 1163 aa, Coccinella septempunctata
MNQGGRGQRAGPLRNRPEVEPDGVSCGASGAAPRDGTVSQSSNVRSVRRSISLDGIRTRSADVPITRDGRTRWTIEENTLIMRVHYIAIELQATSGRTYRDLLTSTWNEINPERHSYPNLLANRVRWIMEHEKFSSVELEAIKRSIRPFAPPPSDETNYTEVEQPEIENQETTQLENLFKKNMQLYTKISPQNRPKIPRLKGSRNIHESVKEVNKIIKSTLKRNSTLEEVVDCVFAGAVTVCQENKIHITSRQPKPKEDKEPPWKQRLEKKINTIRKQIGKLHTYLNTNSPSRKTSKKVARIASEFRIKSIGERFKQDLTKLCDTLKQKVKALGNRIRRYNERSTRYKNNQLFYKNQKQFYRQLEGTTTTEEEFPTPQDMHATWKEIWGHAVEHDGEASWIREAETEAEKYAMEEITITEDDIKAVLKKSNNWTAPGPDGIHNYWWKNFDSTHEQLSKLFQKALTDPSQIPEFCTLGITHMIPKGTKNGDPTNYRPITCLPAIYKILTGTLTHHIWKHVAKNKILAREQNGCRRDARGCKELLIVDALVTKQAKKKLRNLSMGWIDYKKAFDSIPHTWLLKTLRLYGVSECLINLLNHLMATWRTNLRVNTNNGTYTTAEIKIKRGLFQGDKLSTLWFCLAINFLSKLLNKTRYGYLIEKRNNIKINHQLYIDDLKLYAANEDQLLRQLRIVKSFTETIKMQMGLDKCAVLHIKRGKLITGEAMLVEDELRIQRLGPDESYKYLGIQQGLEIRNTEAKTTFRNKFMERLKMILKSKLNAKSTFTAISTWAIPCLSYSFGIIKWSVTDLRAIDTQIRVSLTKYGMHHPHASVNRLYVPRQDGGRGLQNIESTHHRVVREMREYFRSKNSPFFKAISDEDNNITALNLASSNHPIEPKSIEELSEIWHGKALHGRYPTALKWNKIDKVRSVNYLKAGYLFPETEGRLAAIQDQVIPTKAYQKQIMNKNLPNDKCRKCSQATETIQHVTSSCPILAPREYTDRHNAMAKAYHQAIALKNGLIKHQKKIFEYLPKEILENEEMKLYWDHPLVTDRPIAHNRPDIVILKKKKKELIIIDITIPADDNAERAYNEKKIKYHDLAFELKEIYRLTSTSILPLVITTNGLVEAHLFENTIKLELDEKLIGEAQKEVILWTTRIVRRFLTSC

SEQ ID NO: 32472 - protein, 1200 aa, Coccinella septempunctata
MLSGSDDPAYLSHPAPRLAAWEAVDYEAPVTRSMMQGGRGQRAGPLRSRLEAEPVGDSCGASGAAPRDGTVSHSSNNIRRVRRSISLDGIRNRPAEAQTRDGRMRWTEEENILIMRVHFIAEELHQQNAERTYRQILTTTWNEIYPSRLSYPNLLANRVRWIIQNEKFSSVELESIKKSIRPYAPVSTDDTIITEEIDHEQQVSTTLEHKSTEKVFRRNIQLYAKINPQERPRIPRLKGSQNILESVSRTNKIMETILPSNLNIEEIADYVYAGAVTVCEENNIRLIINKHRTEENNMPPWKIRLEKKIERIRANIGVLYTYLNSNSPSRKTIKKISRIASDYKIRATNEPFKQELIVVYDTLKQKAKALGNRIRRYNERVKRYKNNQLYYKNQNQFYRQLEETTTVEEELPKPDEMRTTWEAIWSDGGEHNDGASWIREAEEESKYYIMDRVTITENDIRATLKKTNNWSAPGPDGLHNYWWKHFSCTHKQITKLFQQALVNPSQLPHTLTLGITHMIPKGPGHNNPKNYRPITCLPVIYKILTGVITQKIWNHVRTCNILAPEQNGCRRDAKGSKELLIIDSLITKQAKKKQRNLSMAWIDYRKAFDSIPHSWLLKTLRLYGVEEAIINLLKHLMLTWRTRLHLKTNTGEYTTEQINIRRGLFQGDKLSTLWFCLAINFLSKLLNNTRYGYIIEKRNNTKISHQLYIDDLKLYAANEDQLLKQLRIVTSFTESIKMELGLDKCAVLHMKRGKLIEGEAMLINQGLEMQRMGPEDTYKYLGIKQGLEIRTRETKDAFKTKFMERLKKVLQSKLNAKSTFTAIKAWAMPCLTYSFGIIKWSTTDLRAIDTQVRVLLTRYGMHHPHASVIRLHMPRSEGGRGLQQVENTHNTVVKQMKEYFKSKNSPFFQAIAEEDQNITALNLASTTPPIESPNIEKAAREWHGKALHGRYPTALKWNKINKEKSISYLKAGYLFPETEGRLAAIQDQVIPTRAYLKNIAQKNLPTDLCRKCSQSVETIQHITSSCSTLAPREYTDRHNAMAKVYHQALAIKHGLLKQHKKVYEYSPQTLLENANLKLYWDHPLITDRPISHNRPDIVIFEKKEKTAIIIDITVPADDNAEKAYIEKIVKYHDLAFELKQIYQLTSTLILPLVITTNGLVEMHLIQHTKRLGLDESLIDVAQKEVILWTTRIVRRFLTSS

SEQ ID NO: 32473 - protein, 1247 aa, Adalia bipunctata
MYKMFAYVQNVPELDVSHIYIYIYIYIYIYIYIYIYIYIYIYIYICRGGICLRGVTAPHTPVTQLLRLAAWGAVEYEAPITRSMTKGGRGQRAGPLRSRLEVEPDGVSCGASGATPRDGTVRPNSHGRERRSVSLDGIRIRPAEVSSTRDGRVRWTQEENILLIRTHFIAQQEHQDTGRNYRETLTTTWNESNPGKQSYTNLLSNRVRLILQNEKFSSVELEAIKKSIRPYTRNPAENTDIDNEEAHADHQVQPIPQKTSQIFQKNMEMYARVSTQDRPKIPRLKGSRKILESVERANAVIKSSIREDTTIADLIDCVYAGAITVCEENGIRLCSRQSELREEKIPPWKTRLEKKINNIRKIIGTLHTYLNNNSPSRKIVKRVSRIASEHHIKVRNEQLRQQLIVLCDTLKQKIKALGNRIRRYNERVKRYKNNQLYYKNPKQFYRSLEGIVADNKTYPTPKSIHATWKEIWAHAGDHDDEAFWIKEAESESNKYVMEQIIITGQDLKTVLKKTNNWAAPGPDGIHNYWWKYFNSTHDTLAKLFQKALVNPSVIPESCTLGITYMLPKGTNNEDPKNYRPITCLPTIYKILTGVLTQKLWKHVGKYNIMAREQNGCRKDAKGCKELLIADTIITKQAKKKQRNLSMAWIDYKKAYDSIPHSWLKKILRLYGVSETMINLLEHLMGTWRTRLHLNTNRGGYTTEEIDIRRGIFQGDKLSTLWFCLTINPLSRLLNDSKYGYIIEKRGNTKINHQLFIDDLKLYAANEEQLMRELKVVASFTKTIKMEMGLDKCAVIHVKRGKVTEREAMRVHDHLTIQTLGPEETYKYLGIQQGLEIRTSEVRNTFKDKFIGRLKKILQSKLNSKAMFTSISTWVVPCLAYSFGIIKWSTTELKAIDTQVRGLLTRYGMHHPNASVNRLYIPRKDGGRGLQNVETTHYNTVREMREYFKSRNLPFFKALSEEDDNITALNLSSTNDPIAPPNIQELSERWHGRALHGRYPTALKNKRIDREKSLAYLKAGYLFPETEGRLTAIQDQVVPTRAYLKNIIGKNLTTDRCRKCSQACETIQHVTSSCPILAPREYTDRHNSMAKAYHQAIAKKYGLLRTTQPIHEYSPKEILENEEVKLYWDHPLITDRSIPHNRPDLVLFEKRLNQVIIADVTIPADDNVERAYTGKILKYHDLAFELKEIHRLTCTRILPLIITTNGLVETHLLENTLKLGIDESIIGDAQKEVILWTTRIVRRFLTSK

SEQ ID NO: 32474 - protein, 1163 aa, Coccinella septempunctata
MNQGGRGQRAGPLRSRPEVEPDGVSCGASGAAPRDGTVSQSSNVRSVRRSISLDGIRTRSADVPITRDGRTRWTIEENTLIMRVHYIAIELQATSGRTYRDLLTSTWNEINPERHSYPSLLANRVRWIMEHEKFSSVELEAIKRSIRPFAPPPSDETNYTGVEQPEIENQETTQLENLFKKNMQLYTKISPQNRPKIPRLKGSRNIHESVKEVNKIIKSTLKRNSTLEEVVDCVFAGAVTVCQENKIHITSRQPKPKEDKEPPWKQRLKKKINTIRKQIGKLHTYLNTNSPSRKTSKKVARIASEFRIKSIGERFKQDLTKLCDTLKQKVKALGNRIRRYNERSTRYKNNQLFYKNQKQFYRQLEGTTTTEEEFPTPQDMHATWKEIWGHAVEHDDEASWIREAETEAEKYAMEEITITEDDIKAVLKKSNNWTAPGPDGIHNYWWKNFDSTHEQLSKLFQKALTDPSQIPEFCTLGITHMIPKGTKNGDPTNYRPITCLPAIYKILTGTLTHHIWKHVAKNKILAREQNGCRRDARGCKELLIVDALVTKQAKKKLRNLSMGWIDYKKAFDSIPHTWLLKTLRLYGVSECLINLLNHLMATWRTNLRVNTNNGTYTTAEIKIKRGLFQGDKLSTLWFCLAINFLSKLLNKTRYGYLIEKRNNIKINHQLYIDDLKLYAANEDQLLRQLRIVKSFTETIKMQMGLDKCAVLHIKRGKLITGEAMLVEDELRIQRLGPDESYKYLGIQQGLEIRNTEAKTTFRNKFMERLKMILKSKLNAKSTFTAISTWAIPCLSYSFGIIKWSVTDLRAIDTQIRVSLTKYGMHHPHASVNRLYVPRQDGGRGLQNIESTHHRVVREMREYFRSKNSPFFKAISNEDNNITALNLASSNHPIEPKSIEELSEIWHGKALHGRYPTALKWNKIDKVRSVNYLKAGYLFPETEGRLAAIQDQVIPTKAYQKQIMNKNLPNDKCRKCSQATETIQHVTSSCPILAPREYTDRHNAMAKAYHQAIALKNGLIKHQKKIFEYLPKEILENEEMKLYWDHPLVTDRPIAHNRPDIVILKKKKKELIIIDITIPADDNAERAYNEKKIKYHDLAFELKEIYRLTSTSILPLVITTNGLVEAHLFENTIKLELDEKLIGEAQKEVILWTTRIVRRFLTSC

SEQ ID NO: 32475 - protein, 903 aa, Coccinella septempunctata
MPPWKTRLEKKINNIRKIIGTLHTYLNNNSPTRKIVKRVTRITSQHHIKARDEQLRQQLIILCDTLKQKIKALGNRIRRYNERVKRYKNNQLYYKNPKQFYRSLEGTVTDNKTHPTPENIHATWKEIWAHAGDHDDEAFWIKEAETESNKYMMEQIIITEHDIKTVLKKTNNWAAPGPDGIHNYWWKYFNSTHDALARLFHKALTNPSVIPESCTLGITYMLPKGANNEDPKNYRPITCLPTIYKILTGILTHKLWKHVGKYNIMAREQNGCRKDAKGCKELLIADTIITKQAKKKQRNLSMAWIDYKKAYDSIPHSWLKKILRLYGVSETMINLLEHLMGTWRTRLHVNTNKGGYTTEEIEIKRGIFQGDKLSTLWFCLTINPLSKLLNDSKYGYVIEKKKNTKINHQLFIDDLKLYAANEEQLMRELKIVASFTKTIKMEMGLDKCAVIHMKRGKVTEGEAMRVQDHLTIQTLGPEETYKYLGIQQGLEIRTNEVKNTFKDKFIGRLKKVLQSKLNSKAMFTSISTWVVPCLAYSFGIIKWSTTELRAIDTQVRGLLTRYGMHHPNASVNRLYIPRKDGGRGLQNIETTHHNTVNEMREYFRSRNLPFFKALSEEDDNVTALNLSSSNDPIAPPNIQELSEIWHGRALHGRYPTALKNKKIDREKSLAYLKAGYLFPETEGRLTAIQDQVIPTRAYLKNIIGKNLTTDRCRKCSQSLETIQHVTSSCPILAPREYTDRHNSMAKAYHQAIAKKYGLLGTTQPIHKYSPKEILENGEVKLYWDQPLITDRSIPHNRPDIVLFEKRLKQVIIADVTIPADDNVERAYTEKILKYHDLAFELKEINRLTCTRILPLIITTNGLVETHLVENTLKLGLDESIISDAQKEVILWTTRIVRRFLTSN

SEQ ID NO: 32476 - protein, 1163 aa, Coccinella septempunctata
MNQGGRGQRAGPLRSRPEVEPDGVSCGASGAAPRDGTVSQSSNVRSVRRSISLDGIRTRSADVPITRDGRTRWTIEENTLIMRVHYIAIELQATSGRTYRDLLTSTWNEINPERHSYPNLLANRVRWIMEHEKFSSVELEAIKRSIRPFAPPPSDETNYTEVEQPEIENQETTQLENLFKKNMQLYTKISPQNRPKIPRLKGSRNIHESVKEVNKIIKSTLKRNSTLEEVVDCVFAGAVTVCQENKIHITSRQPKPKEDKEPPWKQRLEKKINTIRKQIGKLHTYLNTNSPSRKTSKKVARIASEFRIKSIGERFKQDLTKLCDTLKQKVKALGNRIRRYNERSTRYKNNQLFYKNQKQFYRQLEGTTTTEEEFPTPQDMHATWKEIWGLAVEHDDEASWIREAETEAEKYAMEEITITEDDIKAVLKKSNNWTAPGPDGIHNYWWKNFDSTHEQLSKLFQKALTDPSQIPEFCTLGITHMIPKGTKNGDPTNYRPITCLPAIYKILTGTLTHHIWKHVAKNKILAREQNGCRRDARGCKELLIVDALVTKQAKKKLRNLSMGWIDYKKAFDSIPHTWLLKTLRLYGVSECLINLLNHLMATWRTNLRVNTNNGTYTTAEIKIKRGLFQGDKLSTLWFCLAINFLSKLLNKTRYGYLIEKRNNIKINHQLYIDDLKLYAANEDQLLRQLRIVKSFTETIKMQMGLDKCAVLHIKRGKLITGEAMLVEDELRIQRLGPDESYKYLGIQQGLEIRNTEAKTTFRNKFMERLKMILKSKLNAKSTFTAISTWAIPCLSYSFGIIKWSVTDLRAIDTQIRVSLTKYGMHHPHASVNRLYVPRQDGGRGLQNIESTHHRVVREMREYFRSKNSPFFKAISDEDNNITALNLASSNHPIEPKSIEELSEIWHGKALHGRYPTALKWNKIDKVRSVNYLKAGYLFPETEGRLAAIQDQVIPTKAYQKQIMNKNLPNDKCRKCSQATETIQHVTSSCPILAPREYTDRHNAMAKAYHQAIALKNGLIKHQKKIFEYLPKEILENEEMKLYWDHPLVTDRPIAHNRPDIVILKKKKKELIIIDITIPADDNAERAYNEKKIKYHDLAFELKEIYRLTSTSILPLVITTNGLVEAHLFENTIKLELDEKLIGEAQKEVILWTTRIVRRFLTSC

SEQ ID NO: 32477 - protein, 979 aa, Coccinella septempunctata
MYAKINPHERPRIPRLKGSLKILESVRRTNEIMKKIMPDNLNIEQVTDYVYAGAATVCEENNVRLIVTKSRIRENRAPPWKIRLEKKIESIRSKIGVLHTYLNSNSPSRKTTKKISCIASEHNVRGRDGPFKQKLMVIYDTLKQKAQALGNRVKRYNERVKRYKNNQLYYKNQKLFYRQLEETTTAEEDFPKPDEMRTTWEEIWSDKGEHDDRASWIREAEEESKNYVMDQVTITEDDVRATLKKTCNWSAPGPDGLHNYWWKHFSSTHKKIAKLFQQALVNPSQLPNTLTLGITHMIPKGPKNNNPKDYRPITCLPVVYKILTGVITQIIWKHVGKNKILAREQNGCLKDAKGSKELLIVDSLITKQAKKKQRNISMAWIDYRKAFDSIPHSWLLKTLRLYGVSEAIINLLKYLMLTWRTRLHLNTNTGEYTTAEIKIRRGLFQGDKLSTLWFCLAINFLSKLLNNTKYGYILKKTNNTKINHQLYIDDLKLYAANEDQLRRQLRIVTSFTETVKMEMGLDKCAVLHVKRGKLVEEEAMLIQQGLQIQRMGPEETYKYLGIQQGLEIKTAEARDAFKTKVIERVKKVLQSKLNAKSTFTAIKAWAMPCLAYSFGVIKWSTTELRALDTQIRVLLTRYGMHHPHASVTRLYMPRNEGGRGLQKIEHMHHTVVKQMREYFQSKNSPFYQAIAEEDHNITALNLASRIDPVETSNIEEITREWHGKALHGRYPTALKWNKINKEKSVSYLKAGYLSPETEGRLAAIQDQVIPTRAYLKNIVKKNLPTDRCRKCSQSVETIQHVTSSCATLAPKEYTDRHNAMANVYHQAIAIKHGLLKYHKKIHEYSPQTLLENENLKLYWDHPLITDRSVLHNRPDIVIFDKKEKTATIIDITVPADDNAEKAYTEKIVKYHDLAFELKEIHQLTCTSILPLVITTNGLVEMHLTQHTTQLGLDESLIDVAQREVILWTTRIVRRFLTSS

SEQ ID NO: 32478 - protein, 981 aa, Adalia bipunctata
MEMYARVSTQDRPKIPRLKGSRKILESVERANAVIKSSIRGDTTIADLIDCVYAGAITVCEENGIRLCSRQSEPKEEKIPPWKTRLEKKINNIRKIIGTLHTYLNNNSPSRKIVKRVSRIASEHHIKVRNEQLRQQLIVLCDTLKQKIKALGNRIRRYNERVKRYKNNQLYYKNPKQFYRSLEGIVADNKTYPTPKSIHATWKEIWAHAGDHDDEAFWIKEAESESNKYVMEQIIITGQDLKTVLKKTNNWAAPGPDGIHNYWWKYFNSTHDTLAKLFQKALVNPSVIPESCTLGITYMLPKGTNNEDPKNYRPITCLPTIYKILTGVLTHKLWKHVGKYNIMAREQNGCRKDAKGCKELLIVDTIITKQAKKKQRNLSMAWIDYKKAYDSIPHSWLKKILRLYGVSETMINLLEHLMGTWRTRLHLNTNRGGYTTEEIDIRRGIFQGDKLSTLWFCLTINPLSKLLNDSKYGYIIEKRGNTKINHQLFIDDLKLYAANEEQLMRELKVVASFTETIKMEMGLDKCAVIHVKRGKVTEREAMTVHDHLTIQTLGPEETYKYLGIQQGLEIRTSEVRNTFKDKFIGRLKKILQSKLNSKAMFTSISTWVVPCLAYSFGIIKWSTTELRAIDTQVRGLLTRYGMHHPNASVNRLYIPRKDGGRGLQNVETTHYNTVSEMREYFKSRNSPFFKALSEEDDNITALNLSSTNDPIAPPNIQELSERWHGRALHGRYPTALKNKRIDREKSLAYLKAGYLFPETEGRLTAIQDQVVPTRAYLKNIIGKNLTTDRCRKCSQACETIQHVTSSCPILAPREYTDRHNSMAKAYHQAIAKKYGLLRTTQPIHEYSPKEILENEEVKLYWDHPLITDRSIPHNRPDLVLFEKRLNQVIIADVTIPADDNVERAYTEKILKYHDLAFELKEIHRLTCTRILPLIITTNGLVETHLLENTLKLGIDESIISDAQKEVILWTTRIVRRFLTSN

SEQ ID NO: 32479 - protein, 1168 aa, Coccinella septempunctata
MNQGGRGQRAGPLRSRPEVEPDGVSCGASGAAPRDGTVRPNSNPHRRERRSISLDGTRSRPAEAPVSRDGRVRWSQEENILLMRTHFIAQQLQQDTGRTYREILTTTWNEINPWRPSYPNLLANRIRQMLENEKFSSVELEVIRKSTRPYTPIPADDDNTSNEEIHLEPQIQPTTQNNKTSRLFEKNMKMYSRVSPQKRPRIPRLKGSRKILESVERTNMAMKAHITDNCAIEDLIDCVYAGAITVCEENGIQLCREESRPKEERTPPWRIRLERKIISIRRTIGTIHTYLNNSQPTKKICKKVSRIASEHHIKGRKENLRQQLVILSDTLKQKIKALGNRIRRYNERVRRYRNNQLYYKNTNQFYRTLDGTTTDNKTNPTPERMHATWKEIWGHAGDHDDEAFWIREAETESHKYTMEQVIITKEDIKTVLKKTNNWSAPGTDGIHNYWWKYFNSTHDNLAKLFQEALKNPSIIPDSCTLGITYMLPKGTDNEDPRNYRPITCLPTIYKILTGVLTQKLWRHVGKYNIMAREQNGCRRDAKGCKDLLIADTIITKQARKKQRNLSMAWIDYKKAYDSIPHSWLKKVLKLYGVSETVINLLEHLMQTWRTKLSVDTNKGNYTTEEIRIQRGIFQGDKLSTLWFCLSINLLSKLLNQSKYGYVIERRNNTKINHQLYIDDLKLYAANEDQLTRELKIVASFTDAIKMEMGLDKCAVVHMRRGKIREGEALEIQEQLTIRTLSPEETYKYLGIQQGLEINTNEAKTTFKHKFFGRLKKILQSKLNSKAMFTSISTWVVPCLAYSFGIIKWSTTDLRAIDIQVRKLLTKYGIHHPNASSNRLYISRKDGGRGLPNIEMAHYNTVKEMKKYFKSKNSPLLKALSAEDDNITALNLSSNSYPSEPSNIQELSNIWHGKALHGRFPTALKHKKVDKQRSLTYLRAGYLFPETEGRLTAIQDQVIPTRAYQKNIIGKKLTTDKCRKCSLSPETIQHVTSSCPILAPKEYTDRHNAMAKAYHQAIAKKYGLVKSTLPVYKYLPKEILENEQVKLYWDHPLVTDRSIPHNRPDIVLFEKTQRKVTIADITVPADDNIEKAYTEKIVKYHDLAFELKEINRLTCTTILPLIITTNGLVETHLLENTKKLGLEEHVIDDAQKEVILWTTRIVRRFLTSN

SEQ ID NO: 32480 - protein, 1157 aa, Coccinella septempunctata
MSSKRPIRIYIYIYVSCGASGTAPRDGTVSPISNTSRRLRRSISLDGIRSRPAELPRRDGRTRWTKEENILIMRVHFIAKELQGTTNRTYREILTTTWNEINPSKLSYPNLLSNRVRWILQEEKFSSVELEEIKRSTRPFAPPPKNETRNSEELPPEPQIPIRPQVGKTERMFHKNKLMYTKVPPELRPKIPRLQGSRRIIESVEKVNAIIKSEIKYNSTLEDVLDYVYAGAITVCEENDIRINHTQPKPAENRTPPWKIRLEGKITNIRKKIGKIHTYLNTSSPTRKMAKKIAQIASEHHIRNTNEQFKEQLTVVHDILKQKAKALGNRIKRYNERVTRYKNNQLYYKNQKQFYRQLEGIKKTEEEFPTPESMHKTWEKIWSSSGEHNDEASWIREAEAESDKYNMEQINITENDIKTALKKTNNWSAPGPDAVHNYWWKYFDSTHKRLAEIFQRALTDPTCIPETCTLGISHMIPKGAKNGDPTNYRPITCLPVIYKILTGIVTQKIWDHVAKNSILAREQNGCRRDVKGCKELLIIDSLITKQAKKKLRSLSMAWIDYKKAFDSIPHSWLLKTLELYGVSEAVVNLLKHLMGTWRTKLHVNTNEGDYTTAEIKIKRGLFQGDKLSTLWFCLAINHLSILLNKSRYGYIVEKRNNIKINHQLYIDDLKLYAANEDQLLRQLKIVAYFTETIKMEMGLDKCAVLHMKRGKLISGEAMLVQDELQIQRLGPKETYKYLGIQQGLEINTAETKTAFKNKLMSRIKKILQSKLNAKPTFTSISTWAIPCLSYSFGIVKWSTTDLKAIDTQIRVLLTKYGMHHPNASTNRLYIPRKDGGRGLENVEITHHRVVKEMREYFKSKNSPFFRTLCEEDNNITALNLASRNLPAEPPNISELSEIWHGKALHGRYPNALKRNRIDKERSVKYLKAGYLFPETEGRLAAIQDQVVSTRAYQKNILNKNLPSDKCRKCSQAAETIQHVTSSCPILAPREYTDRHNAMAKAYHQAIALKKGLIKQQKKIHEYIPKEILENDEVKLYWDHPLITDRPIPHNRPDIVLILKTEKKLIIIDITVPADDNAERAYTEKILKYHDLAFELKEIYKLTSTSILPLVITTNGLVEAHMLESTIQLELDEHLIEEAQKQVILWTTRIVRRFLTSS

SEQ ID NO: 32481 - protein, 979 aa, Coccinella septempunctata
MYTKVPPELRPKIPRLQGSRRIIESVEKVNAIIKSEIKYNSTLEDVLDYVYAGAITVCEENDIRINHTQPKPAENRTPPWKIRLEGKITNIRKKIGKIHTYLNTSSPTRKMAKKIAKIASEHHIRNTNEQFKEQLTVVNDILKQKAKALGNRIKRYNERVTRYKNNQLYYKNQKQFYRQLEGIKKTEKEFPTPESMHKTWEKIWSSSGEHNDEASWIREAEAESDKYNMEQINITENDIKTALKKANNWSAPGPDAVHNYWWKYFDSTHKRLAEIFQRALTDPTCIPETCTLGISHMIPKGAKNGDPTNYRPITCLPVIYKILTGIVTQKIWDHVAKNSILAREQNGCRRDVKGCKELLIIDSLITKQAKKKLRSLSMAWIDYKKAFDSIPHSWLLKTLELYGVSEAVVNLLKHLMGTWRTKLHVNTNEGDYTTAEIKIKRGLFQGDKLSTLWFCLAINHLSILLNRSRYGYIVEKRNNIKINHQLYIDDLKLYAANEDQLLRQLKIVASFTETIKMEMGLDKCAVLHMKRGKLISGEAMLVQDELQIQRLGPKETYKYLGIQQGLEINTAETKTAFKNKLISRIKKILQSKLNAKPTFTSISTWAIPCLSYSFGIVKWSTTDLKAIDTQIRVLLTKYGMHHPNASTNRLYIPRKDGGRGLENVEITHHRVVKEMREYFKSKNSPFFRTLCEEDNNITALNLASRNLPAEPPNISELSEIWHGKALHGRYPNALKRNRIDKERSVKYLKAGYLFPETEGRLAAIQDQVVPTRAYQKNILNKNLPSDKCRKCSQAAETIQHVTSSCPILAPREYTDRHNAMAKAYHQAIALKKGLIKQQKKIHEYIPKEVLENDEVKLYWDHPLITDRPIPHNRPDIVLILKTEKKLIIIDITVPADDNAERAYTEKILKYHDLAFELKEIYKLTSTSILPLVITTNGLVEAHMLESTIELKLDEHLIEEAHKQVILWTTRIVRRFLTSS

SEQ ID NO: 32482 - protein, 1140 aa, Coccinella septempunctata
MGSAPRDGTVRPDSNPHRRERRSISLDGIRTRPAEVSNTRDRRVRWTKEENVLLIRTHFIAQQLQQDTGRTYREILTTTWNEINPGKLSYPNLLANRVKLILQNEKLSSVELEVIKKSIRPHTIITSENTDAETEETHAETQIEPTPQWNKTAQVFMKNMRMYEKVSPQDRPRIPRLKGSRRILECVERTNSVIKSRIQDHSSIEDLIDCVYAGAITVCEENGIRLCDKEFKPKEEKIPPWRTRLEKKINNIRKTIGTLHTYLNNNSPTRKIVKRVSRIASQHHIESHNEQLRQKLIILSDTLKQKIKALGNRIRRYNERVKRYKNNQLFYKNPKQFYRTLEGTSADNKTYPTPESIHTTWKEIWSYSGDHDDEAFWIKEAEAESNKYVMEQIIITGQDIKTVLKKTNNWSAPGPDAIHNYWWKYFDSTHNHLAKLFQEALKNPSIIPESCTLGITHMLPKGTNNEDPKNYRPITCLPTIYKILMGILTQKLWRHVGRYNIMAREQNGCRKDAKGCKELLIIDTIITKQAKKKQRNLSMAWIDYKKAYDSIPHSWLKKVLRLYGVSETMINLLEHLMGTWRTRLHVNTDRGDYTTEEIKIMRGIFQGDKLSTLWFCLAINLLSKLLNASKYGYVIEKRNNTRINHHLYIDDLKLYAANEEQLMRELKIVASFTETIKMEMGLDKCAVLHVKRGKLTEGEAMKVQDLITIQTLGPERTYKYLGIQQGLEIRNSEVKIIFKEKFINRLKKILQSKLNSKAMFTSISTWVVPCLAYSFGIIKWSTTDLKALDTQVRGLLTRFGIHHPNASVNRLYIPRKDGGRGLQNIETTYYNTVKEMREYFKSKDSPFFKALSAEDNNITTLNLSSNSDPPAPPTIQELSEVWQGRALHGRFPTVLKHRKIDRDRSLTYLKGGYLFPETEGRLTAIQDQVVATRAYLKNIIGKNMTTDKCRKCSQSPETIQHITSSCSILAPREYTDRHNAMAKAYHQAIAKKHGLLETTRPIYEYLPKEILENEEVKLYWDHPLITDRSIPHNRPDIVLFEKKLKKLIIADVTIPADDNIERAYTEKIMKYHDLSFELKEIYGLTYSTILPLVITTNGLVETHLLENTMKLGLDESVIGDAQKEVILWTTRIVRRFLTSN

SEQ ID NO: 32483 - protein, 1163 aa, Coccinella septempunctata
MNQGGRGQRAGPLRSRPEVEPDGVSCGASGAAPRDGTVSQSSNVRSVRRSISLDGIRTRSADVPITRDGRTRWTIEENTLIMRVHYIAIELQATSGRTYRDLLTSTWNEINPERHSYPNLLANRVRWIMEHEKFSSVELEAIKRSIRPFAPPPSDETNYTEVEQPEIENQETTQLENLFKKNMQLYTKISPQNRPKIPRLKGSRNIHESVKEVNKIIKSTLKRNSTLEEVVDCVFAGAVTVCQENKIHITSRQPKPKEDKEPPWKQRLEKKINTIRKQIGKLHTYLNTNSPSRKTSKKVARIASEFRIKSIGERFKQDLTKLCDTLKQKVKALGNRIRRYNERSTRYKNNQLFYKNQKQFYRQLEGTTTTEEEFPTPQDMHATWKEIWGHAVEHDDEASWIREAETEAEKYAMEEITITEDDIKAVLKKSNNWTAPGPDGIHNYWWKNFDSTHEQLSKLFQKALTDPSQIPEFCTLGITHMIPKGTKNGDPTNYRPITCLPAIYKILTGTLTHHIWKHVAKNKILAREQNGCRRDARGCKELLIVDALVTKQAKKKLRNLSMGWIDYKKAFDSIPHTWLLKTLRLYGVSECLINLLNHLMATWRTNLRVNTNNGTYTTAEIKIKRGLFQGDKLSTLWFCLAINFLSKLLNKTRYGYLIEKRNNIKINHQLYIDDLKLYAANEDQLLRQLRIVKSFTETIKMQMGLDKCAVLHIKRGKLITGEAMLVEDELRIQRLGPDESYKYLGIQQGLEIRNTEAKTTFRNKFMERLKMILKSKLNAKSTFTAISTWAIPCLSYSFGIIKWSVTDLRAIDTQIRVSLTKYGMHHPHASVNRLYVPRQDGGRGLQNIESTHHRVVREMREYFRSKNSPFFKAISDEDNNITALNLASSNHPIEPKSIEELSEIWHGKALHGRYPTALKWNKIDKVRSVNYLKAGYLFPETEGRLAAIQDQVIPTKAYQKQIMNKNLPNDKCRKCSQATETIQHVTSSCPILAPREYTDRHNAMAKAYHQAIALKNGLIKHQKKIFEYLPKEILENEEMKLYWDHPLVTDRPIAHNRPDIVILKKKKKELIIIDITIPADDNAERAYNEKKIKYHDLAFELKEIYRLTSTSILPLVITTNGLVEAHLFENTIKLELDEKLIGEAQKEVILWTTRIVRRFLTSC

SEQ ID NO: 32484 - protein, 981 aa, Coccinella septempunctata
MQLYTKISPQNRPKIPRLKGSRNIHESVKEVNKIIKSTLKRNSTLEEVVDCVFAGAVTVCQENKIHITSRQPKPKEDKEPPWKQRLEKKINTIRKQIGKLHTYLNTNSPSRKTSKKVARIASEFRIKSIGERFKQDLTKLCDTLKQKVKALGNRIRRYNERSTRYKNNQLFYKNQKQFYRQLEGTTTTEEEFPTPQDMHATWKEIWGHAVEHDDEASWIREAETEAEKYAMEEITITEDDIKAVLKKSNNWTAPGPDGIHNYWWKNFDSTHEQLSKLFQKALTDPSQIPEFCTLGITHMIPKGTKNGDPTNYRPITCLPAIYKILTGTLTHHIWKHVAKNKILAREQNGCRRDARGCKELLIVDALVTKQAKKKLRNLSMGWIDYKKAFDSIPHTWLLKTLRLYGVSECLINLLNHLMATWRTNLRVNTNNGTYTTAEIKIKRGLFQGDKLSTLWFCLAINFLSKLLNKTRYGYLIEKRNNIKINHQLYIDDLKLYAANEDQLLRQLRIVKSFTETIKMQMGLDKCAVLHIKRGKLITGEAMLVEDELRIQRLGPDESYKYLGIQQGLEIRNTEAKTTFRNKFMERLKMILKSKLNAKSTFTAISTWAIPCLSYSFGIIKWSVTDLRAIDTQIRVSLTKYGMHHPHASVNRLYVPRQDGGRGLQNIESTHHRVVREMREYFRSKNSPFFKAISDEDNNITALNLASSNHPIEPKSIEELSEIWHGKALHGRYPTALKWNKIDKVRSVNYLKAGYLFPETEGRLAAIQDQVIPTKAYQKQIMNKNLPNDKCRKCSQATETIQHVTSSCPILAPREYTDRHNAMAKAYHQAIALKNGLIKHQKKIFEYLPKEILENEEMKLYWDHPLVTDRPIAHNRPDIVILKKKKKELIIIDITIPADDNAERAYNEKKIKYHDLAFELKEIYRLTSTSILPLVITTNGLVEAHLFENTIKLELDEKLIGEAQKEVILWTTRIVRRFLTSC

SEQ ID NO: 32485 - protein, 784 aa, Coccinella septempunctata
MHATWKEIWGHAVEHDDEASWIREAETEAEKYAMEEITITEDDIKAVLKKSNNWTAPGPDGIHNYWWKNFDSTHEQLSKLFQKALTDPSQIPEFCTLGITHMIPKGTKNGDPTNYRPITCLPAIYKILTGTLTHHIWKHVAKNKILAREQNGCRRDARGCKELLIVDALVTKQAKKKLRNLSMGWIDYKKAFDSIPHTWLLKTLRLYGVSECLINLLNHLMATWRTNLRVNTNNGTYTTAEIKIKRGLFQGDKLSTLWFCLAINFLSKLLNKTRYGYLIEKRNNIKINHQLYIDDLKLYAANEDQLLRQLRIVKSFTETIKMQMGLDKCAVLHIKRGKLITGEAMIVEDELRIQRLGPDESYKYLGIQQGLEIRNTEAKTTFRNKFMERLKMILKSKLNAKSTFTAISTWAIPCLSYSFGIIKWSVTDLRAIDTQIRVSLTKYGMHHPHASVNRLYVPRQDGGRGLQNIESTHHRVVREMREYFRSKNSPFFKAISDEDNNITALNLASSNHPIEPKSIEELSEIWHGKALHGRYPTALKWNKIDKVRSVNYLKAGYLFPETEGRLAAIQDQVIPTKAYQKQIMNKNLPNDKCRKCSQATETIQHVTSSCPILAPREYTDRHNAMAKAYHQAIALKNGLIKHQKKIFEYLPKEILENEEMKLYWDHPLVTDRPIAHNRPDIVILKKKKKELIIIDITIPADDNAERAYNEKKIKYHDLAFELKEIYRLTSTSILPLVITTNGLVEAHLFENTIKLELDEKLIGEAQKEVILWTTRIVRRFLTSC

SEQ ID NO: 32486 - protein, 1163 aa, Coccinella septempunctata
MNQGGRGQRAGPLRSRPEVEPDGVSCGASGAAPRDGTVSQSSNVRSVRRSISLDGIRTRSADVPITRDGRTRWTIEENTLIMRVHYIAIELQATSGRTYRDLLTSTWNEINPERHSYPNLLANRVRWIMEHEKFSSVELEAIKRSIRPFAPPPSDETNYTEVEQPEIENQETTQLENLFKKNMQLYTKISPQNRPKIPRLKGSRNIHESVKEVNKIIKSTLKRNSTLEEVVDCVFAGAVTVCQENKIHITSRQPKPKEDKEPPWKQRLEKKINTIRKQIGKLHTYLNTNSPSRKTSKKVARIASEFRIKSIGERFKQDLTKLCDTLKQKVKALGNRIRRYNERSTRYKNNQLFYKNQKQFYRQLEGTTTTEEEFPTPQDMHATWKEIWGHAVEHDDEASWIREAETEAEKYAMEEITITEDDIKAVLKKSNNWTAPGPDGIHNYWWKNFDSTHEQLSKLFQKALTDPSQIPEFCTLGITHMIPKGTKNGDPTNYRPITCLPAIYKILTGTLTHHIWKHVAKNKILAREQNGCRRDARGCKELLIVDALVTKQAKKKLRNLSMGWIDYKKAFDSIPHTWLLKTLRLYGVSECLINLLNHLMATWRTNLRVNTNNGTYTTAEIKIKRGLFQGDKLSTLWFCLAINFLSKLLNKTRYGYLIGKRNNIKINHQLYIDDLKLYAANEDQLLRQLRIVKSFTETIKMQMGLDKCAVLHIKRGKLITGEAMLVEDELRIQRLGPDESYKYLGIQQGLEIRNTEAKTTFRNKFMERLKMILKSKLNAKSTFTAISTWAIPCLSYSFGIIKWSVTDLRAIDTQIRVSLTKYGMHHPHASVSRLYVPRQDGGRGLQNIESTHHRVVREMREYFRSKNSPFFKAISDEDNNITALNLASSNHPIEPKSIEELSEIWHGKALHGRYPTALKWNKIDKVRSVNYLKAGYLFPETEGRLAAIQDQVIPTKAYQKQIMNKNLPNDKCRKCSQATETIQHITSSCPILAPREYTDRHNAMAKAYHQAIALKNGLIKHQKKIFEYLPKEILENEEMKLYWDHPLVTDRPIAHNRPDIVILKKKKKELIIIDITIPADDNAERAYNEKKIKYHDLAFELKEIYRLTSTSILPLVITTNGLVEAHLFENTIKLELDEKLIGEAQKEVILWTTRIVRRFLTSC

SEQ ID NO: 32487 - protein, 1172 aa, Rhagonycha fulva
MIRCVCGTDFSPNEGLKTHLRRGRCRGARKTDPDEFACSVCAIRVFKTYAGMRQHMRLAHPVQYNADVEAHAEGLPRAASRWGDEELLAMARAEVAFGGRFINKHLESVMSGRTLETIKSRRQQSDYKEFVDELRAEKGGGSVPGDVIEEEERAKTRTRRSLPRGEIVEGSNILTGLPLPVDMALGLSKGMGSREVECPDEVHPIIITKSSSSEREGRSPKTLKMSFHKNAKKGRIITRRQRQRASYKNVDIHSESSNDEVDPSPAVCLIPPPDGSHPNDNHNLPTSPGTPDRSIREPISSADPIVIRLSELYREKPDWTEGDLSLLTAVAKHTKRNRDALRGEVAAWLQTLVAQIGAGRKEGSKGSNMKKNDKNAPPKGRAPLYKESQRMFGSNRKVLADQILTGKNIGSNPIQPPRELLERGLRELFGAISPTDSVPISDPKPSPGLWYPISELEIGRALSSSKTTATGPDGMRLSSLLKVHNPVHRLELFFNSCLVAEGLPSGLYVSRTVMIPKGEINLDNPDNWRPISIPSAMAKLMNKILAKRLTENLNLHPHQRGFMAVNGVFLNTATIHTLIKKRRRMVRPYHLVFLNLRKAFDTVSHHSIRRALVRFQVDPRLVDFVMGGYDESYTLLAPPSGGDADSASPIRVTRGVKQGDPLSPILFNLVIDELICKLEAEGLGLQINNLLKIACLAYADNIVLISETYESLQKMIKIAVNFFGDRGLALNPGKCVSISCRVAPGKKVLYHSTRARFFIGGVPIRVLDPVELYKYLGERYNHLGQAGPFFKDLKLMLGRLSKAALKPQQKLNILKQYLLPKLLARLTSITITKDVLKGSDRMIRIFVRRILHLNRTCASAYIHAPIRMGGLGITSLLTSVPRILHGFFAEAMLSMNILTNAVLASPEGESLWRRLGKWTGEFGKTKNETREAWSEKLESSYSGGGLQQGRGTPYSSRWIDDPPTFWSGEDFVKSAQLRGNLLPTVGVPSNPKEIQKCRGCGTRIESLSHVLQACHVAHDARVKRHNRVMNRLGKICEKRGWVVLYEARIRTKEGRLYKPDLILSNGDRAVVCDVSIVWESWGLDKAARGKEDKYSAAPVMEALRKKFPGVEIMVTSLIVGARDTWSDTNNKLRDVLRLSNNECVSIVNNTVNSSIIVHGVFMRTIWRRADSR

SEQ ID NO: 32488 - protein, 1077 aa, Rhagonycha fulva
MGGRSLEAIKTRRTKSDYKDFVTSLRTEGGGGPVVRDVIEEENRAQKTRRSLRSHDKKAVTGRAQNITRGSPFMGEPVAGPSHSWGEAAGGSAMVDSASATSSSSSEDERQSVSTRAAQKVTSNIRTRRSLIHSTPDIVGLNVYSDNSNDDEVGSSPAVCIIPPSGSAHSESIVSVSSPELNISSAPPRSIRDPILAADPIVRRVAELFNEHDNWTDEDLSVFAAVACTTNKNKALLREVVADWLRTLVTRLVPEQRGSGGSRSKKNLNKSKNIVPPKSRGAIYKATQALFAKNRKVLADKVLSGKNIADNPTEPPRELLERGLQDLFSAVSPKDSAPIEHPKDTPNLWYPITKEEITLALSTSKATASGPDGIKLFQLLKVPVHRLELFLNSCLVSGGLPVDLYVSRTIMIPKGESELDNPDNWRPISIPSVMTRLMNKIIAKRLSDNVKLHPNQRGFTSVNGVFLNTATLHSLIKNRRRKCRPYHLVALDLRKAFDTVSHHSLRRALRRFNIDPRLIEFVMGGYNESSTLLAPAPDGDGSATSIRVTRGVKQGDPLSPILFNLVMDELLCVLEAANLGLSVSDVLTLACLAYADDLVLVSESYEKLQKLLKIALDFFNKRGLALNIKKCVSVSCRVAPGKRVLYYSSRTRFFIGGVPIRVLGPAELFNYLGEKYNHLGQARPFFEDLKASLIRLSKAALKPQQKLLVLKQYLIPKIMARLTAITITKDALKGADRLIRTFVRKALHLNKTCASAYLHAPIRMGGLGIVSLLATVPKILHDFCAEAMLSKDLLTTAILASPEGESLWRRLGKWTERSGKTSSAIKEMWRERLEASYSGAGLQQGRGTPYSSRWIDHPPTFWSGGDYVKSVQLRGNLLPTVGVPSNPVEQRLCRGFRAKSESLSHVLQGCPTTHDARIRRHNRVMTRTGTLASAKGWMVLYEPHIRNKLGRLYKPDLIMSRGNRVVVCDVAIVWESWGLSKAFHEKVAKYSEKSVMEALRRKFPEKEITVTALIIGARGTWSDLNNELRDVLCLSSNECASIINNTVNGSIIVHGVFSKTVWRRTNASSGELGGALR

SEQ ID NO: 32489 - protein, 796 aa, Ostrinia furnacalis
MDFEMVSIEVFQNVLRKLHNWKATGTDQIHNYWIKKYIYLHPFLHNYINRFIQNPQTMPEYITTGITYMLPKDPNDLSNPAKYRPITCLQTIYKIITACLTQMIYKHIDTFQILTEQQKGCRKLSQGCKEQLIIDSVVLQQVQRRKKDLFTMYIDYKKAYDSVPHSWLLKVLEIYKLHPQIISFLETSMKNWSTKLKLNTADNTIETQPIKIQRGIFQGDALSPLWFCLALNPLSNHLNSIDTGYNFYYHNNNNIENTYELTDTKLNHLFYMDDIKLYASNEDDLRHLAEVTENYTKDICMEFGIDKCKINSIKAGQNYKHTYRLETGEQIEALEENETYKYLGYNQSKQIHQKKTKEALIQKFKHRLNITLKTQLYAKHTIKAINTFAIPILTYSFGIIKWTNSELKGLQRNINTTMTKSRKHHPRSCIQRLTLPRSEGGRGLIDIINLHNKQISNLRSYFHAKAETSPIHAVITLNDQRLTPLNLQDRNLQKNEKLTDNKTKIAEWAQKSLHGRHRNDLNQTNVDKDASNEWLSRGELFPETEGFILAIQDQVIETRNYQKYIMKTHNLPTDLCRKCNSSSETIQHITGACKSIAQTDYKHRHDQVANIIHQKLAVMFKLLQGPPVAYYKYTPLTIIENDTHKLYFDRAILTDKTTHYNRPDITIIDKLNRTAHLIDIAIPNTHNLQSTIGEKLSKYIDLKEEVKCIWKLQKVTIVPIVLSTTGVIPKQLHQSLHTLNLPKHTYIQLQKAVILNTCRIVRKFLQVDEIVQIRPPSEGQRRIVSLQNTTRDSTIC

SEQ ID NO: 32490 - protein, 1313 aa, Marasmia exigua
MESNENRYNLRSLPGGRRGTSGAGAGRGSMRTIGDEELSRRTPIEEYASAEEDYESTSSVYTLAADSSSSVSSISSSTEDVVQLALEAENTASTKVGQRIRKKWNNHMNSFLLRSYFIHTKLGTDTHKYLQPLYDDFTREFKDSTVSKQNLGGQCRAIFRNKLLNEAEIVKIKSDAELFLRNNSININTNNTSNETGQRRRWSNEVNETIMRCYYRITQLGRDETAYRPQLHAAVIQEHLELAAVTVQRIADQRRTIIKNKRLCENRLTEIRREVEAELNNQPTQARSIENMIYQITEEERQRDTDYSQINTQSQSTSSTLSMSSNTSTNNFETVTVTCTPNCNTEIENFDESLLTTVLGETQTDTNTQAQTHNNPNNPNNPEIDQLFNKALEFYKNSQPTQRQALPRQRASKKLAITINYINKTLLPKNIDKDTDYNTLQTTLYCCAWTAAKLNGAKLEIPPIPDSNRRPRHMNKPRWQQRIENKIKDLRTQIARLTYYINGNRGHKLVKHVQKIFSNNKIHSTHEASNTDLSHFLDTLKQKLTVATSRLKRYSVCTLRKSQNTQFQYNEKNFYRTLKTASSNQAGNVDCAEKPQATEFKNYWAGIWENPVDHDTEAEWIKTEEQKFETIEGMEFEAIPVDIFQGVIKKLHNWKAPGTDHLHNFWYKRFTYIQPFIYNHINNFIQEPHTMPDYITTGITYMLPKDQTDSSNPAKYRPITCLQTIYKIITACLTETIYKHIDRYQILTEQQKGCKKFSQGCKEQLVIDSVILQQVQKKKKDLFTMYIDYKKAYDSVPHSWLLKVLQIYKLHPQIISFLSTAMQNWTTKLKIYTNKDTVETELIKIQRGIFQGDALSPLWFCLALNPLSNNLNMLNTGYTLNYNEDPNRKEEFKLNHLFYMDDLKLYASNQNDLEELAQTTEVFSKNICMEFGIDKCKINSVKSGKMFRHSYQLHTREQIDPLDENETYKYLGYQQSKQILCKETKISLTQKFKHRLNSILKTNLYAKHTIKAINSFAIPILTYSFGIVKWTKTELKNIQRSINTTMTKNRKHHPRSCIQRLTLPRTDGGRGLIDVTNLHNKQITNLRTYFHQKNSTSPLHKAIVANDDHLTPLNLADKMTQSNEAQTDRQTKLQQWAQKALHGRHLHDLRHTNVDLTASNEWLSRGELFPETEGFMLAIQDQVIETRNYQKYIIRTPNLPTDLCRKCNSASETIQHITGACKSIVQTHYKHRHDQVANVIHQNLATMHSLITQPPVPYYKYTPATVLENTTHKLYFDRAILTDKTIHYNRPDLVLIDKNSKTAFIIDIAIPNP

SEQ ID NO: 32491 - protein, 1044 aa, Lycas argentea
MFNQALQHFIHSDPVKRPYIPRQHTSKKLASAVNYINKTILPKLVNSESDFPTIQTIIYSAAWTAAKINGAKISIPVIENNSNLLRKNIKPKWQRRLDNKVNSLRTKIGRLTQYINGFRSNKLNREIEQIKKQFQIHTTHEAPNTQLQHFLDTLKQKLAVASSRLARYNACASRRTQNIKFSNNEKLFYRSLKTTTSNRSHTNSINQTPPLVELRQFWAGIWENPVEHNEQADWIIKEYSNNINIPSMQFENISIDTFKNVINRLHNWKSPGSDQIHNYWYKKFTSIHPYLHNHINNFIKHPKQMPAYITAGTTFMLPKDSNDISNPAKYRPITCLQTIYKIITSCITEIMNEHIETNKILTEQQKGCRRSSQGCKEQLTIDSVILKQVQRQKKDLYTMYIDYKKAYDSVPHTWLLQILDIYKIHPYIISFLRESMTNWSTKLRITTPQGNIESMPIKIQRGIYQGDALSPLWFCLALNPLSNTLNSLNLGYPLKSHTTTNDEQTDKILLNHLLYMDDIKLYSSTQTDLNKLASITETFSRDILMEFGIDKCRINSVKAGQNITHNYQLQTKEIIEALEENEQYKYLGYKQSKQIAYKETKDTLKQQFKHRLNSILKTQLYSKNTVKAINTYAIPILTYSFGIINWTKSDLKTLQRSINTSMTKFRKHHPRACIQRQVLPRKEGGRGIIHIPNLHNKQIATLRTYFHTKSQTSPLHNAIVHNDIKLTPLNLQDKTIQPNEIETDKRTIIAEWAQKSLHGRHYADLNQTNVDKLASNEWLNRGELFPETEGFMLAIQDQVIETRNYQKYIIKIPNISDTCRRCNSSSETIQHITGACKAIVQTDYKHRHDQVANIIHQKLALKYALLTKSYPPTPYYKYNPDTVLENNAFKLYYDRAILTDKTTHYNRPDITVIDKLNKNALLIDIAIPNTHNLQNTIAEKLSKYTDLKDEIKRMWKLNNVTIVPVVLSSTGVIPKQLHQSLNTLNLPHHTYITLQKAVILNTCRIVRKFLQTDNNRNTDHTSSQTNLQTQFNMQTDITPNYHLA

SEQ ID NO: 32492 - protein, 1300 aa, Ernsta colotes
MPSNKDKKQKWSETELHELMYCYYTTKASGYGYTKRFLKLFKERNPDNPKLATLNANTLANQARSTIARKVIDPAVLMEIQYRAEQNPLMVLSLSPTQQISDINQVNIQRSQNSLHSPDMPYAHQHAIYRTVQTSERMRWTKEHNEHIMRSYYRITQLETNLTTYRRHLHEDFIITFPHLSHVTEQRVADQKRLIVKNKYISEDRLNALKQEIARELNTRIEEINTDVEEGNNNFTIINNDTNESNFLDNIQLLTDNVQAENSANEWNLEIDNIFTKTLQHYLNIAPTQRNYIPKQRSSKKLALIINYINRTILPEYIKEDTDYDMLQTVLYCAAWTAAKANGAKIEIPHRTESIRKRKKRKPKWQMRLEYKVEDLRAKIGRLTQFIRGSRSTNLEYHVTKILKQYKIHSTHEEPNTQLTHFLDTLKQKLSALSSRLQRYKTCTLRKDQNVQFTNNEKQFYRSLKDITSNVNINQNNSPSHQSAPSTEELRRFWSSIWETPVIHKKDTEWVHNEESRNQNIYPMHFEYIPVETFQNVINKLHNWKTPGSDNLHNYWYKKFTHIHPYLHTHINHFIHNPYTIPSYITAGTTYMLPKDSEDLTNPAKYRPITCLQTVYKIITACLANIIHKHVESNNILTEQQKGCRKFSQGCKEQLTIDSVILKQVQKQKKDLFTMYIDYRKAYDSVPHSWLIEVLELYKIHPHIITFLKNTMTKWTTRLRLTNDDRTIESEPIKIQRGIFQGDALSPLWFCLALNPLSNTLNSINAGYPLQYQEQHPNIQTISAEYKLNHLLYMDDIKLYASSEEDLCELAKTTENFTRDIYMEFGIDKCKINSVKEGQIYRHQYQTQSGEQIRSLNEGELYKYLGYNQSKQINNAEIKEILMKQFKHRLNSILNTHLNAINTTKAINTYAIPILTYSFGIINWTKTELKNLQRLIRTRMTKYRKHHPRSCIQRITLPRSEGGRGLIDITNLHNRQISGLRSYFHHKTLTSPLHAAIVKNDKHLTPLNLHDITTQKNEVQTDGQTKCSEWARKSLHGRHYHDLSQPNVDKAASNEWLRRGELFPETEGFMLAIQDQVIETRNYQKHIMKVPNLPTDACRRCSGASETIQHITGACKSIVQTDYKHRHDQIANIIHQKLALKYQLITQPPTPYYKYTPETVLESSQHKLYFDRAILTDKTTHYNRPDITLIDKKNKTALIIDIAIPNTHNLQSTISEKLNKYTDLKLEIMRMWHLNKVTIVPIVISTTGVIPKQLHQFISFLELHPSTYISMQKAVILNTCRIVRKFLQTDSSPQSDSHLV

SEQ ID NO: 32493 - protein, 868 aa, Montipora capitata
MEKEKSKLRKLKRRFWSRKKNEDARRMNREFQLDPGRVYASFKETIESQGDCERPSYEHGQQDKEIIQRLFTDVNEASSFWKALWEPEGNVNIEAEWLDEIRCVMRENIPDVPEGSFELCAEQTKRVILKKRNWSAPGPDRILNYWWKRVDLVHDGIARAFQAIVQEDQEIPLWFAEGKSSLLPKPGEFARANQRPIACLNTVYKWFTSCVLKPVDSHLVDNDLMEGEQRGAKQNCSGTTDNLLIDRMVCLDSQRGRRNVSMAWIDVRKAYDSVDHRWLREMFSLHRFPKWIGRLIARFSDKWNTRIVVRTQEGLEVSERISFRRGLPQGDAFFPKLFTLCLNPIAWKLRATEGYRLSKPLNAKITNLLYVDDLKVYAASEGKLERVLRDVKGAMEDIGLHWNEKKCAVAHVKRGVLQESTGMLVGEHELVKSLEEDSQYKFLGVLENTKQEDTLVLENAARTYLRRLSVIWSSPLSDYFKVVATNQFALPVITYFMWTQVWPIAELQKIDRDTRKVITENGGKHPLASTDLLYLSRQAGGQGLKSVEAEFKATKIKAAVRLYQNKDPTIGLVRQFEEKVEKKGRRSLVRDAQTYAEELGMKLELQCPLPSGSTNEGESIEGKKIRPWVKEVVINKRCENIRQQRWQGKLVTARWGDEDLDKECFSWLAEWRMAPTHSIAGINELYEQLLSTKLYHSRKAKTWEDLDATCRMCGEAQESVAHVLAGCNALAQTKYLARHNAALKIIFFELLKDYLLIETTPLWYSPIQPKPVYENNQVTAYWDVPVYAYDTEVRANRVDARFVDKGRKIVTLLEMSCPWTENRDQKDQEKTQKYAALRWEVKQQYPGFEIRQVNLIVDVLGLIYTVRF

SEQ ID NO: 32494 - protein, 1175 aa, Pachyseris speciosa
MMSHPKHVFIKKINFKNIVWFIKAISYLVLLRSLNNNNNNNNNNNNNNKLIMQEFRNEFIVSQRDTANLHSTASTQVPVGHNTSTSTQAPEGHSASPISTPISTSVCELLQLTEPILASVAKSPGDFSGRRHDTRTKQRPTGAEVKDVNAAVSVLLKHNKIPDPAQDPFGSLWIANCILYSVIVAFYISKDWKKGDGNRERTGKPKQSPKAKEEFEAQAREIRAKLSKAKAEIERLKSNKKITKKGKKNRLELLRECKTLSVAILVAYMEKQKSRLRKVKRGYWRRKKQEDARRMNAQFELDPGRVYSDFRRVIDDQGEVAKPKYVHGQEDNESQRNVFSDAEEATTFWRSLWEAEGAGSVSAEWLDEVRDAIREKVPVPPEKDFDLSTKQAEKVIMKKRNWSAPGPDRIVNFWWKKANCLHVGIVRAFQVIAQSDQDVPLWFTEGRTSLIPKPGDFSSENQRPITCLNTVYKWFTSCLLEPVNSHLEDYDLMEGEQRGAKEKCSGTTDNLLIDRMVCQDSQRGRRNISMAWIDVRKAYDSVSHNWLREMFSVHRFPQWIGNLIERLSAKWNTRIFVRTRQGTELSERILFARGLPQGDALCPKLFTLCMNPVAWKLQASEGYRLSKPINTKITDLLYVDDLKVYAASEAKLKVVLREVQAAMGDIGLLWNEKKCAVVNVKRGCLQELAPGLKIDKQQLIKSLTEDSQYKFLGVLESIKQKDSLVLESAARVYLQRLSVIWSSPLSDHYKVVATNQFALPVLVYFMWTQVWPITELQRLDRESRKIMVENGGKHPLGTSDLLYLPRRVGGRGLKSIEAEYKLTKVKAAARLYNNSDPTMELVRQYEEKARRTGRHSLIGDAQRFAEELGMKLELKYPEPSGTTEQGELIEGRKIGVWAKKAVQSKRFEDTKEKKWQGKLMTARWENEKLDGECFSWMTEWRAAPTHTIAGIMELYEQLLPTRLYNSRKTKTTDDPDARCRMCGKAQESVAHVLSGCSVLAQTKYLSRLNAALKILFFELLKSYQLIEVIPPWYSPTQPKPFYENEQATVYWDVPVYADHTEVHANRVDARIVDKENQTVTLLEMSCPWVENREQKEKEKTLKYAPLRLELKQQYPGHKINQVNIIIDVLGGYSKELYSSVRDLLGAERSRECLRRMQKSVLSSSLNIARSFKVLS

SEQ ID NO: 32495 - protein, 1088 aa, Acropora hyacinthus
MQEFRNEFIVSQTDTANLHSTASTQVPVGHNASTSTQAPEGHNISPISTSVCELLQLTDPILASVAKSRGDFNGRRYDTRTKQRPTGAEIKDVNAAVSVLLKHNTIPDPAQDPFGYLWIVNCILYSVIVAFYISKDWKKGDVNVERTGKPKRGSKAKEEFEAQAREIRGKLSKAKAEIERLKSNKKITKKGKKNRLELLRECKTLSVAVLVAYMEKQKSRLRKLKRGYWRRKKQEDARRMNAQFELDPGRVYSDFRRVIDDHSEVAKPKYVHGQEDNESQRNVFSDAEEATTFWRTLWEAQDAGNVKAEWLDEVRDAIREKVPVPPEKDFELSAKQAEKVIMKKRNWSAPGPDRIVNFWWKRVNCLHVGIVRAFQVIAQSDQDVPLWFTEGRTSLIPKPGEFSSENQRPITCLNTVYKWFTSCLLEPVNSHLEDYDLMEGEQRGAKEKCSGTTDNLLIDRMVCQDSQRGRRNISMAWIDVRKAYDSVSHNWLREMFSVHRFPQWIGNLIERLSAKWNTRISVRTRQGTELSERILFARGLPQGDALCPKLFTLCMNPIAWKLQASEGYRLSKPINTKITDLLYVDDLKVYAASEAKLKVVLREVQAAMGDIGLLWNERKCAVVNVKRGCLQELAPALKIDEQQLIKSLTEDSQYKFLGVLESIKQEDSLVLESAARVYLQRLSVIWSSPLSDHHKVVATNQFALPVLVYFMWTQVWPITELQRLDRESRKIMVENGGKHPLGTSDLLYLPRKVGGRGLKSIEAEYKLTKVKAAVRLYNNTDPTMQLVRQFEEKARRTGRHSLIGDAQRFAEELGMKLELRYPDPSGTTEQGEVIEGRKIGVWAKKAVQSKRFEDTKEKKWQGKLMTVRWEDEKLDGDCFSWMTEWRAAPTHTIAGIMELYEQLLPTKLYNSRKTKTTDDPDARCRLCGKAQESVAHVLSGCSVLAQTKYLSRHNAALKILFFELLKSYQLIEVIPPWYSPTQPKPSYENEQVTVYWDVPVYADHIEVHANRVDARIVDKENQTVTLLEMSCPWVENREQKEKEKTLKYAPLRLELKRQYPGYRINQVNIIIDVLGATPRNCTAVLGIC

SEQ ID NO: 32496 - protein, 1148 aa, Acropora intermedia
MGNVRDTITRNAGNRREKQRARESEELIMQEFRNEFIVSQSDTANLHSTASTQVPVGHNASTSTQAPEGHSIAPISTSVYELLQLTDPILASVAKSRGDFNGRRYDTRTKQRPTGAEIKDVNAAVSVLLKHNTIPDPAQDPFGYLWIVNCILYSVIVAFYISKDWKKDDGNGERTGKPKRGSKAKEEFEAQAREIRGKLSKAKAEIERLKSNKKITKKGKKNRLELLRECKTLSVAILVAYMEKQKSRLRKVKRGYWRRKKQEDARRMNAQFELDPGRVYSDFRRVIDDHSEVAKPKYVHGQEDNESQRNVFSDAEEATTFWRTLWEAQGAGNVKAEWLDEMRDAIREKVPVPPEKDFELSAKQAEKVIMKKRNWSAPGPDRIVNFWWKRANCLHVGIVRAFQVIAQSDQDVPLWFTEGRTSLIPKPGEFSSENQRPITCLNTVYKWFTSCLLEPVNSHLEDYDLMEGEQRGAKEKCSGTTDNLLIDRMVCQDSQRGRRNISMAWIDVRKAYDSVSHNWLREMFSVHRFPQWIGNLIERLSAKWNTRISVRTRQGTELSERILFARGLPQGDALCPKLFTLCMNPIAWKLQASEGYRLSKPINTKITDLLYVDDLKVYAASEAKLKVVLREVQAAMGDIGLLWNERKCAVVNVKRGCLQELAPGLKIDEQQLIKSLTEDSQYKFLGVLESIKQEDSLVLESAARVYLQRLSVIWSSPLSDHHKVVATNQFALPVLVYFMWTQVWPITELQRLDRESRKIMVENGGKHPLGTSDLLYLPRKVGGRGLKSIEAEYKLTKVKAAVRLYNNSDPTMQLVRQFEEKARRTGRHSLIGDAQRFAEELGMKLELRCPDPSGTTEQGEVIEGRKIGVWAKKAVQSKRFEDTKEKKWQGKLMTVRWEDEKLDGECFSWMTEWRAAPTHTIAGIMELYEQLLPTKLYNSRKTKTTDDPDARCRMCGKAQESVAHVLSGCSVLAQTKYLSRHNAALKILFFELLKSYQLIEVIPPWYSPTQPKPSYENEQATVYWDVPVYADHIEVHANRVDARIVDKENQTVTLLEMSCPWVENREQKEKEKTLKYAPLRLELKQQYPGYRINQVNIIIDVLGGYSKELYSSVRDLLGAERSRECLRRMQKSVLSRSLNIVRSFKVLS

SEQ ID NO: 32497 - protein, 907 aa, Acropora muricata
MEKQKARLRKVKRGYWRRKKQEDARRMNAQFELDPGRVYSDFRRVIDDHSEVTKPKYVHGLEDNESQRNVFSDAEEATTFWRTLWEAQGAGNVKAEWLDEVRDAIREKVPVPPEKDFELSAKQAEKVIMKKRNWSAPGPDRIVNFWWKRANCLHVGIVRAFQVIAQSDQDVPLWFTEGRTSLIPKPGEFSSENQRPITCLNTVYKWFTSCLLEPVNSHLEDYDLMEGEQRGAKEKCSGTTDNLLIDRMVCQDSQRGRRNISMAWIDVRKAYDSVSHNWLREMFSVHRFPQWIGNLIERLSAKWNTRISVRTRQGTELSERILFARGLPQGDALCPKLFTLCMNPIAWKLQASEGYRLSKPINTKITDLLYVDDLKVYAASEAKLKVVLREVQAAMGDIGLLWNERKCAVVNVKRGCLQELAPGLKIDEQQLIKSLTEDSQYKFLGVLESIKQEDSLVLESAARVYLQRLSVIWSSPLSDHHKVVATNQFALPVLVYFMWTQVWPITELQKLDRESRKIMVENGGKHPLGTSDLLYLPRKVGGRGLKSIEAEYKLTKVKAAVRLYNNSDPTMQLVRQFEEKARRTGRHSLIGDAQRFAEELGMKLELRCPDPSGTTEQGEVIEGQKIGVWAKKAVQSKRFEDTKEKKWQGKLMTVRWEDEKLDGECFSWMTEWRAAPTHTIAGIMELYEQLLPTKLYNSRKTKTTDDPDARCRLCGKAQESVAHVLSGCSVLAQTKYLSRHNAALKILFFELLKSYQLIEVIPPWYSPTQPKPSYENEKATVYWDVPVYADHIEVHANRVDARIVDKENQTVTLLEMSCPWVENREQKEKEKTLKYAPLRLELKQQYPGYRINQVNIIIDVLGGYSKELYSSVRDLLGAERSRECLRRMQKSVLSSSLNIARSLKVLS

SEQ ID NO: 32498 - protein, 1181 aa, Acropora acuminata
MKILKELWDDLGYAGLNLTCQNLRDQAARMEKTMGNVRDTITRNAGNRREKQRARESEELIMQEFRNEFIVSQTDTANLHSTASTQVPVGHNASTSTQAPEGHNISPISTSVCELLQLTNPILASVAKSRGDFNGRRYDTRTKQRPTVAEIKDVNAAVSVLLKHNTIPDPAQDPFGYLWIVNCILYSVIVAFYISKDWKKGDGNVEGTGKPKRGSNAKEEFEAQAREIRGKLSKAKAEIERLKSNKKITKKGKKNRLELLRECKTLSVAVLVAYMEKQKSRLRKVKRDYWRRKKQEDARRMNAQFELDPGRVYSDFRRVIDDHSEVANPKYVHGQEDNESQRNMFSDAEEATTFWRTLWEAQDAGNVKAEWLDEVRDAIREKVPVPPEKDFELSAKQAEEVIMKKRNWSAPGPDRIVNFWWKRANCLHVGIVRAFQVIAQSDQDVPLWFTEGRTSLIPKPGEFSSENQRPITCLNTIYKWFTSCLLEPVNSHLEDYDLMEGEQRGAKEKCSGTTDNLLIDRMVCQDSQRGRRNISMAWIDVRKAYDSVSHNWLREMFSVHRFPQWIGNLIERLSAKWNTRISVRTRQGTELSERILFARGLPQGDALCPKLFTLCMNPIAWKLQASEGYRLSKPINTKITDLLYVDDLKVYAASEAKLKVVLREVQAAMGDIGLLWNERKCAVVNVKRGCLQELAPALKIDEQQLIKSLTEDSQYKFLGVLESIKQEDSLVLESAARVYLQRLSVIWSSPLSDHHKVVATNQFALPVLVYFMWTQVWPITELQRLDRESRKIMVENGGKHPLGTSDLLYLPRKVGGRGLKSIEAEYKLTKVKAAVRLYNNTDPTMQLVRQFEEKARRTGRHSLIGDAQRFAEELGMKLELRYPDPSGTTEQGEVIEGRKIGVWAKKAVQSKRFEDTKEKKWQGKLMTVRWEDEKLDGDCFSWMTEWRAAPTHTIAGIMELYEQLLPTKLYNSRKTKTTDDPDARCRLCGKAQESVAHVLSGCSVLAQTKYLSRHNAALKILFFELLKSYQLIEVIPPWYSPTQPKPSYENEQATVYWDVPVYADHIEVHANRVDARIVDKENQTVTLLEMSCPWVENREQKEKEKTLKYAPLRLELKQQYPGYRINQVNIIIDVLGGYSKELYSSVRDLLGAERSRECLRRMQKSVLSSSLNIVRSFKVLS

SEQ ID NO: 32499 - protein, 1246 aa, Pachyseris speciosa
MAEQATSQQTEQNNWLTAGRTRRLKWSSDMISDLLECKKRAQELASSEEPARNTNGRKKGYMKILKELWDDLGYAGLNLTCQNLRDQAARMEKTMGNVRDTITRNAGNRSEKHRARESEELIMQEFRNEFIVSQRDTANLHSTASTQVPVGHNTSTSTQAPEGHSASPISTPISTSVCELLQLTEPILASVAKSPGDFSGRRHDTRTKQRPTGAEIKDVNAAVSVLLKHNKIPDPAQDPFGYLWIANCILYSVIVAFYISKDWKKGDGNRERIGKPKQSPKAKEEFEAQAREIRAKLSKAKAEIERLKSNKKITKKGKKNRLELLRECKTLSVAILVAYMEKQKSRLRKVKRGYWRRKKQEDARRMNAQFELDPGRVYSDFRRVIDDQGEVAKPKYVHGQEDNESQRNVFSDAEEATTFWRSLWEAEGAGSVSAEWLDEVRDAIREKVPVPPEKDFDLSTKQAEKVIMKKRNWSAPGPDRIVNFWWKKANCLHVGIVSAFQVIAQSDQDVPLWFTEGRTSLIPKPGDFSSENQRPITCLNTVYKWFTSCLLEPVNSHLEDYDLMEGEQRGAKEKCSGTTDNLLIDRMVCQDSQRGRRNISMAWIDVRKAYDSVSHNWLREMFSVHRFPQWIGNLIERLSAKWNTRIFVRTRKGTELSERILFARGLPQGDALCPKLFTLCMNPVAWKLQASEGYRLSKPINTKITDLLYVDDLKVYAASEAKLKVVLREVQAAMGDIGLLWNEKKCAVVNVKRGCLQELAPGLKIDKQQLIKSLTEDSQYKFLGVLESIKQEDSLVLESAARVYLQRLSVIWSSPLSDHYKVVATNQFALPVLVYFMWTQVWPITELQRLDRESRKIMVENGGKHPLGTSDLLYLPRRVGGRGLKSIEAEYKLTKVKAAARLYNNSDPTMELVRQYEEKARRTGRHSLIGDAQRFAEELGMKLELKYPEPSGTTEQGELIEGRKIGVWAKKAVQSKRFEDTKEKTWQGKLMTARWEDEKLDGECFSWMTEWRAAPTHTIAGIMELYEQLLPTRLYNSRKTKTTDDPDARCRMCGKAQESVAHVLSGCSVLAQTKYLSRHNAALKILFFELLKSYQLIEVIPPWYSPTQPKPFYENEQATVYWDVPVYADHTEVHANRVDARIVDKENQTVTLLEMSCPWVENREQKEKEKTLKYAPLRLELKQQYPGHKINQVNIIIDVLGGYSKELYSSVRDLLGAERSRECLRRMQKSVLSSSLNIARSFKVLS

SEQ ID NO: 32500 - protein, 1246 aa, Pachyseris speciosa
MAEQATSQQTEQNNWLTAGRTRRLKWSSDMISDLLECKKRAQELASSEEPARNTNGRKKGYMKILKELWDDLGYAGLNLTCQNLRDQAARMEKTMGNLRDTITRNAGNRSEKHRARESEELIMQEFRNEFIVSQRDTANLHSTASTQVPVGHNTSTSTQAPEGHSASPISTPISTSVCELLQLTEPILASVAKSPGDFSGRRHDTRTKQRPTGAEVKDVNAAVSVLLKHNKIPDPAQDPFGYLWIANCILYSVIVAFYISKDWKKGDGNRERIGKPKQSPKAKEEFEAQAREIRAKLSKAKAEIERLKSNKKITKKGKKNRLELLRECKTLSVAILVAYMEKQKSRLRKVKRGYWRRKKQEDARRMNAQFELDPGRVYSDFRRVIDDQGEVAKPKYVHGQEDNESQRNVFSDAEEATTFWRSLWEAEGAGSVSAEWLDEVRDAIREKVPVPPEKDFDLSTKQAEKVIMKKRNWSAPGPDRIVNFWWKKANGLHVGIVSAFQVIAQSDQDVPLWFTEGRTSLIPKLGDFSSENQRPITCLNTVYKWFTSCLLEPVNSHLEDYDLMEGEQRGAKEKCSGTTDNLLIDRMVCQDSQRGRRNISMAWIDVSKAYDSVSHNWLREMFSVHRFPQWIGNLIERLSAKWNTRIFVRTRQGTELSERILFARGLPQGDALCPKLFTLCMNPVAWKLQASEGYRLSKPINTKITDLLYVDDLKVYAASEAKLKVVLREVQAAMGDIGLLWNEKKCAVVNVKRGCLQELAPGLKIDKQQLIKSLTEDSQYKFLGVLESIKQEDSLVLESAARVYLQRLSVIWSSPLSDHYKVVATNQFALPVLVYFMWTQVWPITELQRLDRESRKIMVENGGKHPLGTSDLLYLPRRVGGRGLKSIEAEYKLTKVKAAARLYNNSDPTMELVRQYEEKARRTGRHSLIGDAQRFAEELGMKLELKYPEPSGTTEQGELIEGRKIGVWAKKAVQSKRFEDTKEKKWQGKLMTARWEDEKLDGECFSWMTEWRAAPTHTIAGIMELYEQLLPTRLYNSRKTKTTDDPDARCRMCGKAQESVAHVLSGCSVLAQTKYLSRHNAALKILFFELLKSYQLIEVIPPWYSPTQPKPFYENEQATVYWDVPVYADHTEVHANRVDARIVDKENQTVTLLEMSCPWVENREQKEKEKTLKYAPLRLELKQQYPGHKINQVNIIIDVLGGYSKELYSSVRDLLGAERSRECLRRMQKSVLSSSLNIARSFKVLS

SEQ ID NO: 32501 - protein, 907 aa, Acropora microphthalma
MEKQKSRLRKVKRGYWRRKKQEDARRMNAQFELDPGRVYSDFRRVIDDHSEVAKPKYVHGQEDNESQRNVFSDAEEATTFWRTLWEAQDAGNVKAEWLDEVRDAIREKVPVPPEKDFELSAKQAEKVIMKKRNWSAPGPDRIVNFWWKRANCLHVGIVRAFQVIAQSDQDVPLWFTEGRTSLIPKPGEFSSENQRPITCLNTVYKWFTSCLLEPVNSHLEDYDLMEGEQRGAKEKCSGTTDNLLIDRMVCQDSQRGRRNISMAWIDVRKAYDSVSHNWLREMFSVHRFPQWIGNLIERLSAKWNTRISVRTRQGTELSERILFARGLPQGDALCPKLFTLCMNPIAWKLQASEGYRLSKPINTKITDLLYVDDLKVYAASEAKLKVVLREVQAAMGDIGLLWNERKCAVVNVKRGCLQELAPALKIDEQQLIKSLTEDSQYKFLGVLESIKQEDSLVLESAARVYLQRLSVIWSSPLSDHHKVVATNQFALPVLVYFMWTQVWPITELQRLDRESRKIMVENGGKHPLGTSDLLYLPRKVGGRGLKSIEAEYKLTKVKAAVRLYNNSDPTMQLVRQFEEKARRTGRHSLIGDAQRFAEELGMKLELRYPDPSGTTEQGEVIEGRKIGVWAKKAVQSKRFEDTKEKKWQGKLMTVRWEDEKLDGDCFSWMTEWRAAPTHTIAGIMELYEQLLPTKLYNSRKTKTTDDPDARCRLCGKAQESVAHVLSGCSVLAQTKYLSRHNAALKILFFELLKSYQLIEVIPPWYSPTQPKPSYENEQATVYWDVPVYADHIEVHANRVDARIVDKENQTVTLLEMSCPWVENREQKEKEKTLKYAPLRLELKQQYPGYRINQVNIIIDVLGGYSKELYSSVRDLLGAERSRECLRRMQKSVLSSSLNIVRSFKVLS

SEQ ID NO: 32502 - protein, 907 aa, Acropora millepora
MEKQKSRLRKVKRGYWRRKKQEDARRMNAQFELDPGRVYSDFRRVIDDHSEVAKPKYVHGQEDNESQRNVFSDAEEATTFWRTLWEAQGAGNVKAEWLDEVRDAIREKVPVPPEKDFELSAKQAEKVIMKKRNWSAPGPDRIVNFWWKRAICLHVGIVRAFQVIAQSDQDVPLWFTEGRTSLIPKPGEFSSENQRPITCLNTVYKWFTSCLLEPVNSHLEDYDLMEGEQRGAKEKCSGTTDNLLIDRMVCQDSQRGRRNISMAWIDVRKAYDSVSHNWLREMFSVHRFPQWIGNLIERLSAKWNTRISVRTRQGTELSERILFARGLPQGDALCPKLFTLCMNPIAWKLQASEGYRLSKPINTKITDLLYVDDLKVYAASEAMLKVVLREVQAAMGDIGLLWNERKCAVVNVKRGCLQELAPALKIDEQQLIKSLTEDSQYKFLGVLESIKQEDSLVLESAARVYLQRLSVIWSSPLSDHHKVVATNQFALPVLVYFMWTQVWPITELQRLDRESRKIMVENGGKHPLGTSDLLYLPRKVGGRGLKSIEAEYKLTKVKAAVRLYNNSDPTMQLVRQFEEKARRTGRHYLIGDAQRFAEKLGMKLELRCPDPSGTTEQGEVIEGRKIGVWAKKAVQSKRFEDTKEKKWQGKLMTVRWEDEKLDGECFSWMTEWRAAPTHTIAGIMELYEQLLPTKLYNSRKTKTTDDPDARCRMCGKAQESVAHVLSGCSVLAQTKYLSRHNAALKILFFELLKSYQLIEVIPPWYSPTQPKPSYENEQATVYWDVPVYADHIEVHANRVDARIVDKENQTVTLLEMSCPWVENREQKEKEKTLKYAPLRLELKQQYPGYRINQVNIIIDVLGGYSKELYSSVRDLLGAERSRECLRRMQKSVLSSSLNIVRSFKVLS

SEQ ID NO: 32503 - protein, 1242 aa, Acropora yongei
MAEQATSQQTEQNNWLTTGRIRRLKWSSDMISDLLECKKRAQELASSEEPARNTNGRKKGYMKILKELWDDLGYVRLNLTCQNLRDQAARMEKTMGNVRDTITRNAGNRSEKHRARESEELIMQEFRNEFIVSQSVTANLHSTASTQVPVGHNTSTRTQAPEGHSISPISTSVCELLQLTVPILASAAKSPGDFNGRRHDTRTKQRPTRAEIKDVNVAVSVLLKHNKIPDPAQDPFGYLWIANCILYSVIVAFYISKAWKKGDGNRERTGKPKQSSKAKEEFEAQAREIRGKLSKAKAEIERLKSNKKITKRGKKNRLELLRECKTLSVAILVAYMEKQKSRLRKVKRGYWRKKKQEDARRMNAQFELDPGRVYSDFRRVIDDQGEVAKPKYVHGQEDNESQRKVFSDAEEATTFWRSLWEAEGEGCVRAEWLNEVRDAIREKVPVPPEKDFDLSAKQAEKVIMKKRNWSAPGPDRIVNFWWKRANCLHVGIVRAFQVIAQSDQDVPLWFTEGRTTLIPKPGEFSSENQRPITCLNTVYKWFTSCLLEPVNSHLQDYDLMEGEQRGAKEKCSGTTDNLLIDRMVCQDSQRGRRNISMAWIDVRKAYDSVSHNWLREMFSVHRFPQWIGNLIERLSAKWNTRIFVRTRQGTELSERIFFARGLPQGDALCPKLFTLCMNPIAWKLQASEGYRLSKPINTKITDLLYVDDLKVYAASEAKLKVVLREVQAAMRDIGLLWNERKCAVVNVKRGCLQELAPGLKIDRQHMIKSLTEDSQYKFLGVLESIKQEDSLVLESATKVYLQRLSVIWSSPLSDHYKVVATNQFALPVLVYFMWTQVWPITELQRLDRESRKIMVENGGKHPLGTSDLLYLPRRAGGRGLKSIEAEYKLTKVKAAVRLYNNLDPTMELVRQFEEKARRTGRHSLIGDAQRFAEELGMKLELSYPDPSGTTEQGEVIEGRKIGVWAKKAVQSKRFEDTKEKKWQGKLMTARWEDEKLDGECFSWMTEWRAAPTHTIAGIMELYEQLLPTRLYNSRKTKTTDDPDARCRMCGKAQESVAHVLSGCSVLAQTKYLSRHNAALKILFFELLKSYQLIEVIPPWYSPTQPKPSYENEQATVYWDVPVYADHIEVHANRVDARIVDKENQTVTLLEMNCPWVENREQKEKQKTFKYAPLRLELKQQYPGYKINQVNIIIDVLGGYSKEVYSSVRDLLGAERSRECLRRMQKSVLSSSLNIARSFKVLI

SEQ ID NO: 32504 - protein, 1101 aa, Pachyseris speciosa
MQEFRNEFIVSQRDTANLHSTASTQVPVGHNTSTSTQAPEGHSASPISTPISTSVCELLQLTEPILASVAKSPGDFSGRRHDTRTKQRPTGAEVKDVNAAVSVLLKHNKIPDPAQDPFGYLWIANCILYSVIVAFYISKDWKKGDGNRERTGKPKQSPKAKEEFEAQAREIRAKLSKAKAEIERLKSNKKITKKGKKNRLELLRECKTLSVAILVAYMEKQKSRLRKVKRGYWRRKKQEDARRMNAQFELDPGRVYSDFRRVIDDQGEVAKPKYVHGQEDNESQRNVFSDAEEATTFWRSLWEAEGAGSVSAEWLDEVRDAIREKVPVPPEKDFDLSTKQAVKVIMKKRNWSAPGPDRIVNFWWKKADCLHVGIVSAFQVIAQSDQDVPLWFTEGRTSLIPKPGDFSSENQRPITCLNTVYKWFTSCLLEPVNSHLEDYDLMEGEQRGAKEKCSGTTDNLLIDRMVCQDSQRGRRNISMAWIDVRKAYDSVSHNWLREMFSVHRLPQWIGNLIERLSAKWNTRIFVRTRQGTELSERILFARGLPQGDALCPKLFTLCMNPVAWKLQASEGYRLSKPINTKITDLLYVDDLKVYAASEAKLKVVLREVQAAMGDIGLLWNEKKCAVVNVKRGCLQELAPGLKIDKQQLIKSLTEDSQYKFLGVLESIKQEDSLVLESAARVYLQRLSVIWSSPLSDHYKVVATNQFALPVLVYFMWTQVWPITELQRLDRESRKIMVENGGKHPLGTSDLLYLPRRVGGRGLKSIEAEYKLNKVKAAARLYNNSDPTMELVRQYEEKARRTGRHSLIGDAQRFAEELGMKLELKYPEPSGTTEQGELIEGRKIGVWAKKAVQSKRFEDAKEKKWQGKLMTARWEDEKLDGECFSWMTEWRAAPTHTIAGIMELYEQLLPTRLYNSRKTKTTNDPDARCRMCGKAQESVAHVLSGCSVLAQTKYLSRHNAALKILFFELLKSYQLIEVIPPWYSPTQPKPFYENEQATVYWDVPVYADHTEVHANRVDARIVDKENQTVTLLEMSCPWVENREQKEKEKTFKYAPLRLELKQQYPGHKINQVNIIIDVLGGYSKELYSSVRDLLGANEVENA

SEQ ID NO: 32505 - protein, 907 aa, Acropora muricata
MEQQKLRLRKVKRDYWRRKKQEDARRMNAQFELDPGRVYSDFRRVIDDHSEVAKRKYVHGQEDNESHRNVFSDAEEATTFWRTLWEAQGAGNLKAEWLDEVRDAIREKVPVPPEKDFELSAKQAEKVIMKKRNWSAPGPDRIVNFWWKRANCLHVGIARAFQVIARSHQDVPLWFTEGRTSLIPKPGEFSSENQRPITCLNTVYKWFTSCLLEPVNSHLEDYDLIEGQQRGAKEKCSGTTDNLLIDRVVCQDSQRGRRNISMAWIDVRKAYDSVSHNWLREMFSVHRFPQWIGNLIKRLSAKWNTKISVRTRQGTELSESILFARGLPQGDALCPKLFTLCMNPIAWKLQASKGYRLSKPINTKITDLLYVDDLKGYAASEAKLKVVLREVQAAMGDIGLLWNERKCAVVNVKRGRLQELAPGLKIDEQQLIKSLTEDSQYKFLGVLESIKQEDSLVLESAARAYLQRLSVICSSPLSDHHKVVATNQFALPVLVYFMWTQVWPITELQRLDRESRKIMVENGGKHPVGTNDLLYLPRKVGGRGLKSIEVEYKLTKVKAAVRLYNNSDPTMQLVRQFEEKARRTGRQSLIGDAQRFAEELGMKLELRCPDPSGTTEQGEVIEGRKIGVWAKKAVQSKRFEDTKEKKWQGKLMTVRWEDEKLDGECFSWMTEWRAAPTHTIAGIMELYEQLLPTKLYNSRKTKTTDDPDARCRMCGKAQESVAHVLSGYSVLAQTKYLSRHNAALKILFFELLKSYQLIEVILPWYSPTQPKPYYENEQATVYWDVPVFADHMEVHANRVDARIVDKENQTVILLEMSCPWVENREQKEKEKTLKYAPLRLELKQQYPGYRINQVNIIIDVLGGYSKELYSSVRDLLGAERSRECLRRMQKSVLSSSLNIVRSFKVLS

SEQ ID NO: 32506 - protein, 1152 aa, Acropora microphthalma
MEKTMGNVRDTITRNAGNRREKQRARESEELFMQEFRNEFIVSQTDTANLHSTASTQVPVGHNASTSTQAPEGHNISPISSSVCELLQLTDLILASVAKSRGDFNGRRYDTRTKQRPTGAEIKDVNAAVSVLLKHNTIPDPAQDPFGYLWIVNCILYSVIVAFYISKDWKKGDGNVERTGKPKRGSKAKEEFEAQVREIRGKLSKAKAEIERLKSNKKITKKGKKNRLELLRECKTLSVAVLVAYMEKQKSRLRKVKRGYWRRKKQEDARRMNAQFELDPGRVYSDFRRVIDDHSEVAKPKYVHGQEDNESQRNVFSDAEEATTFWRTLWEAQDAGNVKAEWLDEVRDAIREKVPVPPEKDFELSAKQAEKVIMKKRNWSAPGPDRIVNFWWKRANCLHVGIVRAFQVIAQSDQDVPLWFTEGRTSLIPKPGEFSSENQRPITCLNTVYKWFTSCLLEPVNSHLEDYDLMEGEQRGAKEKCSGTTDNLLIDRMVCQDSQRGRRNISMAWIDVRKAYDSVSHNWLREMFSVHRFPQWIGNLIERLSAKWNTRISVRTRQGTELSERILFARGLPQGDALCPKLFTLCMNPIAWRLQASEGYRLSKPINTKITDLLYVDDLKVYAASEAKLKVVLREVQAAMGDIGLLWNERKCAVVNVKRGCLQELAPALKIDEQQLIKSLTEDSQYKFLGVLESIKQEDSLVLESAARVYLQRLSVIWSSPLSDHHKVVATNQFALPVLVYFMWTQVWPIAELQRLDRESRKIMVENGGKHPLGTSDLLYLPRKVGGRGLKSIEAEYKLTKVKAAVRLYNNSDPTMQLVRQFEEKARRTGRHSLIGDAQRFAEELGMKLELRYPDPSGTTEQGEVIEGRKIGVWAKKAVQSKRFEDTKEKKWQGKLMTVRWEDEKLDGDCFSWMTEWRAAPTHTIAGIMELYEQLLPTKLYNSRKTKTTDDPDARCRLCGKAQESVAHVLSGCSVLAQTKYLSRHNAALKILFFELLKSYQLIEVIPPWYSPTQPKPSYENEQATVYWDVPVYADHIEVHANRVDARIVDKENQTVTLLEMSCPWVENREQKEKEKTLKYAPLRLELKQQYPGYRINQVNIIIDVLGGYSKELYSSVRDLLGAERSRECLRRMQKSVLSSSLNIVRSFKVLS

SEQ ID NO: 32507 - protein, 1180 aa, Acropora millepora
MVIGLSGVQFTENNWLTAGRTRRLKWSSDMISDLLECKKRAQELASSEEPARNTNGRKKGYMKILKELWDDLGYAGLNLTCQNLRDQAARMEKTMGNVRDTITRNAGNRREKQRARESEELIMQEFRNEFIVSQTDTANLHSTASTQVPVGHNASTSTQAPEGHNISPISTSVCELLQLTDPILASVAKSRGDFNGRRYDTRTKQRPTGAEIKDVNAAVSVLLKHNTIPDPAQDPFGYLWIVNCILYSVIVAFYISKDWKKGDVNVERTGKPKRGSKAKEEFEAQAREIRGKLSKAKAEIERLKSNKKITKKGKKNRLELLRECKTLSVAILVAYMEKQKSRLRKVKRGYWRRKKQEDARRMNAQFELDPGRVYSDFRRVIDDHSEVAKPKYVHGQEDNESQRNVFSDAEEATTFWRTLWEAQGAGNVKAEWLDEVRDAIREKVPVPPEKDFELSAKQAEKVIMKKRNWSAPGPDRIVNFWWKRAICLHVGIVRAFQVIAQSDQDVPLWFTEGRTSLIPKPGEFSSENQRPITCLNTVYKWFTSCLLEPVNSHLEDYDLMEGEQRGAKEKCSGTTDNLLIDRMVCQDSQRGRRNISMAWIDVRKAYDSVSHNWLREMFSVHRFPQWIGNLIERLSAKWNTRISVRTRQGTELSERILFARGLPQGDALCPKLFTLCMNPIAWKLQASEGYRLSKPINTKITDLLYVDDLKVYAASEAKLKVVLREVQAAMGDIGLLWNERKCAVVNVKRGCLQELAPGLKIDEQQLIKSLTEDSQYKFLGVLESIKQEDSLVLESAARVYLQRLSVIWSSPLSDHHKVVATNQFALPVLVYFMWTQVWPITELQRLDRESRKIMVENGGKHPLGTSDLLYLPRKVGGRGLKSIEAEYKLTKVKAAVRLYNNSDPTMQLVRQFEEKARRTGRHSLIGDAQRFAEELGMKLELRCPDPSGTTEQGEVIEGRKIGVWAKKAVQSKRFEDTKEKKWQGKLMTVRWEDEKLDGECFSWMTEWRAAPTHTIAGIMELYEQLLPTKLYNSRKTKTTDDPDARCRLCGKALESVAHVLSGCSVLAQTKYLSRHNAALKILFFELLKSYQLIEVIPPWYSPTQPKPSYENEQATVYWDVPVYAEHIEVHANRVDARIVDKENQTVTLLEMSCPWVENREQKEKEKTLKYAPLRLELKQQ

SEQ ID NO: 32508 - protein, 1242 aa, Acropora yongei
MAEQATSQQTEQNNWLTTGRIRRLKWSSDMISDLLECKKRAQELASSEEPARKTNGRKKGYMKILKELWDDLGYARLNLTCQNLRDQAARMEKTMGNVRDTITRNAGNRSEKHRARESEELIMQEFRNEFIVSQSVTENLHSTASTQVPVGHNTSTRTQAPEGHSISPISTSVCELLQLTVPILASAAKSPGDFNGRRHDTRTKQRPTRAEIKDVNVAVSVLLKHNKIPDPAQDPFGYLWIANCILYSVIVAFYISKAWKKGDGNRERTGKPKQSSKAKEEFEAQAREIRGKLSKAKAEIERLKSNKKITKRGKKNRLELLRECKTLSVAILVAYMEKQKSRLRKVKRGYWRKKKQEDARRMNAQFELDPGRVYSDFRRVIDDQGEVAKPKYVHGQEDNESQRKVFSDAEEATTFWRSLWEAEGEGCVRAEWLNEVRDAIREKVPVPPEKDFDLSAKQAEKVIMKKRNWSAPGPDRIVNFWWKRANCLHVGIVRAFQVIAQSDQDVPLWFTEGRTTLIPKPGEFSSENQRPITCLNTVYKWFTSCLLEPVNSHLQDYDLMEGEQRGAKEKCSGTTDNLLIDRMVCQDSQRGRRKISMAWIDVRKAYDSVSHNWLREMFSVHRFPQWIGNLIERLSAKWNTRIFVRTRQGTELSERILFARGLPQGDALCPKLFTLCMNPIAWKLQASEGYRLSKPINTKITDLLYVDDLKVYAASEAKLKVVLREVQAAMGDIGLLWNERKCAVVNVKRGCLQELAPGLKIDKQQLIKSLTEDSQYKFLGVLESIKQEDSLVLESATKVYLQRLSVIWSSPLSDHYKVVATNQFALPVLVYFMWTQVWPITELQRLDRESRKIMVENGGKHPLGTSDLLYLPRRVGGRGLKSIEAEYKLTKVKAAVRVYNNLDPTMELVRQFEEKARRTGRHSLIGDAQRFAEELGMKLELSYPDPSGTTEQGEVIEGRKIGVWAKKAVQSKRLEDTKEKKWQGKLMTARWEDEKLDGECFSWMTEWRAAPTHTIAGIMELYEQLLPTRLYNSRKTKTTDDPDARCRMCGKAQESVAHVLSGCSVLAQTKYLSRHNAALKILFFELLKSYQLIEVIPPWYSPTQPKPSYENEQATVYWDVPVYADHIEVHANRVDARIVDKENQTVTLLEMSCPWVENREQKEKEKTFKYSPLRLELKQQYPGYKINQVNIIIDVLGGYSKEVYSSVRDLLGAERSRESLRRMQKSVLSSSLNIARSFKVLI

SEQ ID NO: 32509 - protein, 1180 aa, Pachyseris speciosa
MAEQATSQQTEQSNWLTAGRTRRLKWSSDMISDLLECKKRAQELASSEEPAQNTNGRKKGYMKILKELWDDLGYAGLNLTCQNLRDQAARMEKTMGNVRDTITRNAGNRSEKHRARESEELIMQEFRNELIVSQRDTANLHSTASTQVPAGHNTSTSTQAPEGHSASPISTPISTSVCELLQLTEPILASVAKSPGDFSGRRHDTRTKQRPTGAEVKDVNAAVSVLLKHNKIPDPAQDPFGYLWIANCILYSVIVAFYISKDWKKGDGNRERTGKPKQSPKAKEEFEAQAREIRAKLSKAKAEIERLKSNKKITKKGKKNRLELLRECKTLSVAILVAYMEKQKSRLRKVKRGYWRRKKQEDARRMNAQFELDPGRVYSDFRRVIDDQGEVAKPKYVHGQEDNESQRNVFSDAEEATTFWRSLWEAEGAGSVSAEWLDEVRDAIREKVPVPPEKDFDLSTKQAEKVIMKKRNWSAPGPDRIVNFWWKKANCLHVGIVSAFQVIAQSDQDVPLWFTEGRTSLIPKPGDFSSENQRPITCLNTVYKWFTSCLLEPVNSHLEDYDLMEGEQRGAKEKCSGTTDNLLIDRMVCQDSQRGRRNISMAWIDVRKAYDSVSHNWLREMFSVHRFPQWIGNLIERLSAKWNTRIFVRTRQGTELSERILFARGLPQGDALCPKLFTLCMNPVAWKLQASEGYRLSKPINTKITDLLYVDDLKVYAASEAKLKVVLREVQAAMGDIGLLWNEKKCAVVNVKRGCLQELAPGLKIDKQQLIKSLTEDSQYKFLGVLESIKQEDSLVLESAARVYLQRLSVIWSSPLSDHYKVVATNQFALPVLVYFMWTQVWPITELQRLDRESRKIMVENGGKHPLGTSDLLYLPRRVGGRGLKSIEAEYKLTKVKAAARLYNNSDPTMELVRQYEEKARRTGRHSLIGDAQRFAEELGMKLELKYPEPSGTTEQGELIEGRKIGVWAKKAVQSKRFEDTKEKKWQGKLMTARWEDEKLDGECFSWMTEWRAAPTHTIAGIMELYEQLLPTRLYNSRKTKTTDDPDARCRMCGKAQESVAHVLSGCSVLAQTKYLSRHNAALKILFFELLKSYQLIEVIPPWYSPTQPKPFYENEQATVYWDVPVYADHTEVHANRVDARIVDKENQTVTLLEMSCPWVENREQKRRRKLSSTPHYVWS

SEQ ID NO: 32510 - protein, 907 aa, Acropora nasuta
MEKQKSRLRKLKRGYWRRKKQEDARRMNAQFELDPGRVYSDFRRVIDDHSEVAKPKYVHGQEDNESQRNVFNEAEEDTTFWRTLWEAQGAGNVKAEWLDEVRDAIREKVPVPPEKDFELSAKQAEKVIMKKRNWSAPGPDRIVNFWWKRVNCLHVGIVRAFQVIAQSDQDVPLWFTEGRTSLIPKPGEFSSENQRPITCLNTVYKWFTSCLLEPVNSHLEDYDLMEGEQRGAKEKCSGTTDNLLIDRMVCQDSQRGRRNISMAWIDVRKAYDSVSHNWLREMFSVHRFPQWIGNLIERLSAKWNTRISVRTRQGTELSERILFARGLPQGDALCPKLFTLCMNPIAWKLQASEGYRLSKPINTKITDLLYVDDLKVYAASEAKLKVVLREVQAAMGDIGLLWNERKCAVVNVKRGCLQELAPALKIDEQQLIKSLTEDSQYKFLGVLESIKQEDSLVLESAARVYLQRLSVIWSSPLSDHHKVVATNQFALPVLVYFMWTQVWPITELQRLDRESRKIMVENGGKHPLGTSDLLYLPRKVGGRGLKSIEAEYKLTKVKAAVRLYNNTDPTMQLVRQFEEKARRTGRHSLIGDAQRFAEELGMKLELRYPDPSGTTEQGEVIEGRKIGVWAKKAVQSKRFEDTKEKKWQGKLMTVRWEDEKLDGDCFSWMTEWRAAPTHTIAGIMELYEQLLPTKLYNSRKTKTTDDPDARCRLCGKAQESVAHVLSGCSVLAQTKYLSRHNAALKILFFELLKSYQLIEVIPPWYSPTQPKPSYENEQATVYWDVPVYADHIEVHANRVDARIVDKENQTVTLLEMSCPWVENREQKEKEKTLKYAPLRLELKQQYPGYRINQVNIIIDVLGGYSKELYSSVRDLLGAERSRECLRRMQKSVLSSSLNIVRSFKVLS

SEQ ID NO: 32511 - protein, 1152 aa, Acropora microphthalma
MEKTMGNVRDTITRNAGNRREKQRARESEELIMQEFRNEFIVSQSDTANLHFTASTQVPVGHNASTSTQAPEGHSISPISTSVCELLQLTDPILASVAKSRGDFNGRRYDTRTKQRPTGAEIKDVNAAVSVLLKHNTIPDPAQDPFGYLWIANCILYSVIVAFYISKDWKKGDGNGERTGKPKRGSKAKEQFEAQAREIRGKLSKAKAEIERLKSNKKITKKGKKNRLELLRECKTLSVAVLVAYMEKQKSRLRKVKRGYWRRKKQEDARRMNAQFELDPGRVYSDFRRVIDDHSEVAKPKYVHGQEDNESQRNVFSDAEEATTFWRTLWEAQDAGNVKAEWLDEVRDAIREKVPVPPEKDFELSAKQAEKVIMKKRNWSAPGPDRIVNFWWKRANCLHVGIVRAFQVIAQSDQDVPLWFTEGRTSLIPKPGEFSSENQRPITCLNTVYKWFTSCLLEPVNSHLEDYDLMEGEQRGAKEKCSGTTDNLLIDRMVCQDSQRGRRNISMAWIDVRKAYDSVSHNWLREMFSVHRFPQWIGNLIERLSAKWNTRISVRTRQGTELSERILFARGLPQGDALCPKLFTLCMNPIAWKLQASEGYRLSKPINTKITDLLYVDDLKVYAASEAKLKVVLREVQAAMGDIGLLWNERKCAVVNVKRGCLQELAPALKIDEQQLIKSLTEDSQYKFLGVLESIKQEDSLVLESAARVYLQRLSVIWSSPLSDHHKVVATNQFALPVLVYFMWTQVWPITELQRLDRESRKIMVENGGKHPLGTSDLLYLPRKVGGRGLKSIEAEYKLTKVKAAVRLYNNSDPTMQLVRQFEEKARRTGRHSLIGDAQRFAEELGMKLELRYPDPSGTTEQGEVIEGRKIGVWAKKAVQSKRFEDTKEKKWQGKLMTVRWEDEKLDGDCFSWMTEWRAAPTHTIAGIMELYEQLLPTKLYNSRKTKTTDDPDARCRLCGKAQESVAHVLSGCSVLAQTKYLSRHNAALKILFFELLKSYQLIEVIPPWYSPTQPKPSYENEQATVYWDVPVYADHIEVHANRVDARIVDKENQTVTLLEMSCPWVENREQKEKEKTLKYAPLRLELKQQYPGYRINQVNIIIDVLGGYSKELYSSVRDLLGVERSRECLRRMQKSVLSSSLNIVRSFKVLS

SEQ ID NO: 32512 - protein, 907 aa, Acropora nasuta
MEKQKSRLRKLKRGYWRRKKQEDARRMNAQFELDPGRVYSDFRRVIDDHSEVAKPKYVHGQEDNESQRNVFSDAEEATTFWRTLWEAQDAGNVKAEWLDEVRDAIREKVPVPPEKDFELSAKQAEKVIMKKRNWSAPGPDRIANFWWKRVNCLHVGIVRAFQVIAQSDQDVPLWFTEGRTSLIPKPGEFSSENQRPITCLNTVYKWFTSCLLEPVNSHLEDYDLMEGEQRGAKEKCSGTTDNLLIDRMVCQDSQRGRRNISMAWIDVRKAYDSVSHNWLREMFSVHRFPQWIGNLIERLSAKWNTRISVRTRQGTELSERILFARGLPQGDALCPKLFTLCMNPIAWKLQASEGYRLSKPINTKITDLLYVDDLKVYAASEAKLKVVLREVQAAMGDIGLLWNERKCAVVNVKRGCLQELAPALKIDEQQLIKSLTEDSQYKFLGVLESIKQEDSLVLESAARVYLQRLSVIWSSPLSDHHKVVATNQFALPVLVYFMWTQVWPITELQRLDRESRKIMVENGGKHPLGTSDLLYLPRKVGGRGLKSIEAEYKLTKVKAAVRLYNNTDPTMQLVRQFEEKARRTGRHSLIGDAQRFAEELGMKLELRYPDPSGTTEQGEVIEGRKIGVWAKKAVQSKRFEDTKEKKWQGKLMTVRWEDEKLDGDCFSWMTEWRAAPTHTIAGIMELYEQLLPTKLYNSRKTKTTDDPDARCRLCGKAQESVAHVLSGCSVLAQTKYLSRHNAALKILFFELLKSYQLIEVIPPWYSPTQPKPSYENEQATVYWDVPVYADHIEVHANRVDARIVDKENQTVTLLEMSCPWVENREQKEKEKTLKYAPLRLELKQQYPGYRINQVNIIIDVLGGYSKELYSSVRDLLGAERSRECLRRMQKSVLSSSLNIVRSFKVLS

SEQ ID NO: 32513 - protein, 1230 aa, Acropora cytherea
MAEQATSQQTEQNNWLTAGRTRRLKWSSDMISDLLECKKRAQELASSEEPARNTNGRKKGYMKILKELWDDLGYAGLNLTCQNLRDQAARMEKTMGNVRDTITRNAGNRREKQRARESEELIMQEFRNEFIVSQTDTANLHSTASTQAPEGHNISPISTSVCELLQLTDPILASVAKSRGDFNGWRYVTRTKQRPTGAEIKDVNAAVSVLLKHNTIPDPTQDPFGYLWIVNCILYSVIVTFYISKDWKKGDGNVERTGKPKRGSKAKEEFEAQAREIRGKLSKAKAEIERLKSNKKITKKGKKNRLELLRECKTLSVAVLVAYMEKQKSRLRKLKRGYWRRKKQEDARRMNAQFELDPGRVYSDFRRVIDDHSEVAKPKYVHGQEDNESQRNVFSDAEEATTFWRTLWEAQDAGNVKAEWLDEVRDAIREKVPVPPEKDFELSAKQAEKVIMKKRNWSAPGPDRIVNFWWKRANCLHVGIVRAFQVIAQSNQDVPLWFTEGRTLLIPKPGEFSSENQRPITCLNTVYKWFTSFLLEPVNSHLEDYDLMEGEQRGAKAKCSGTTDNLLIDRMVCQDSQRGRRNISMAWIDVRKAYDSVSHKWLREMFSVHRFPQWIGNLIERLSAKWNTRISVRTRRGTEVSERILFARGLPQGDALCPKLFTLCMNPFAWKLQASEGYRLSKPINTKITDLLYVDDLKVYAASEAKLKVVLREVQAAMGDIGLLWNERKCAVVNVKRGCLQELAPDLKIDEQQLIKSLTEDSQYKFLGVLESIKQEDSLVLESAARVYLQRLSVIWSGPLSDHHKVVATNQFALPVLVYFMWTQVWPITELQRLDRESRKIMVKNGGKHPLGTSDLLYLPRKNGGRGLKSIEAEYKLTKVKTAVRLYNNSDPTIQLVRQFEEKARRTGRHSLIGDAQRFAEELGMKLELRYPDPSGTTEQGDVIEGRKIGVWAKKAVQSKRFEDTKEKKWQGKLMTVRWDDEKLDGDCFSWMTEWRAAPTHTIAGIMELYEQLLSTKLYNSRKTKTTDDPDARCRLCGKAQESVAHVLSGCSVLAQTKYLSRHNAALKILFFELLKSYQLIEVIPPWYSPTQPKPSYENEQATVYWDVPVYADHIEVHANRVDVRIVDKENQAVTLLEMSCPWVENREQKEKEKTLKYAPLRLELKQQHPGYRIDQVNIIIDVLGGYSKELYSSVRDLLGAERSRECLRRMQKSLLSSSLNIVRSFKVLS

SEQ ID NO: 32514 - protein, 1242 aa, Acropora tenuis
MAEQATSQQTEQNNWLTTGRIRRLKWSSDMISDLLECKKRAQELASSEEPARNTNGRKKGYMKILKELWDDLGYARLNLTCQNLRDQAARMEKTMGNVRDTITRNAGNRSEKHRARESEELIMQEFRNEFIVSQSVTANLHSTASTQVPVGHNTSTRTQAPEGHSISPISTSVCELLQLTVPILASAAKSPGDFNGRRHDTRTKQRPTRAEIKDVNVAVSVLLKHNKIPDPAQDPFGYLWIANCILYSVIVAFYISKAWKKGDGNRERTGKPKQSSKAKEEFEAQAREIRGKLSKAKAEIERLKSNKKITKRGKKNRLELLRECKTLSVAILVAYMEKQKSRLRKVKRGYWRKKKQEDARRMNAQFELDPGRVYSDFRRVIDDQGEVAKPKYVHGQEDNESQRKVFSDAEEATTFWRSLWEAEGEGCVRAEWLNEVRDAIREKVPVPPEKDFDLSAKQAEKVIMKKRNWSAPGPDRIVNFWWKRANCLHVGIVRAFQVIAQSDQDVPLWFTEGRTTLIPKPGEFSSENQRPITCLNTVYKWFTSCLLEPVNSHLQDYDLMEGEQRGAKEKCSGTTDNLLIDRMVCQDSQRGRRNISMAWIDVRKAYDSVSHNWLREMFSVHRFPQWIGNLIERLSAKWNTRIFVRTRQGTELSERILFARGLPQGDALCPKLFTLCMNPIAWKLQASEGYRLSKPINTKITDLLYVDDLKVYAASEAKLKVVLREVQAAMGDIGLLWNERKCAVVNVKRGCLQELAPGLKIDKQQLIKSLTEDSQYKFLGVLESIKQEDSLVLESATKVYLQRLSVIWSSPLSDHYKVVATNQFALPVLVYFMWTQVWPITELQRLDRESRKIMVENGGKHPLGTSDLLYLPRRVGGRGLKSIEAEYKLTKVKAAVRLYNNLDPTMELVRQFEEKARRTGRHSLIGDAQRFAEELGMKLELSYPDPSGTTEQGEVIEGRKIGVWAKKAVQSKRFEDTKEKKWQGKLMTARWEDEKLDGECFSWMTEWRAAPTHTIAGIMELYEQLLPTRLYNSRKTKTTDDPDARCRMCGKAQESVAHVLSGCSVLAQTKYLSRHNAALKILFFELLKSYQLIEVIPPWYSPTQPKPSYENEQATVHWDVPVYADHIEVHANRVDARIVDKENQTVTLLEMSCPWVENREQKEKEKTFKYAPLRLELKQQYPGYKINQVNIIIDVLGGYSKEVYSSVRDLLGAERSRECLRRMQKSVLSSSLNIARSFKVLI

SEQ ID NO: 32515 - protein, 884 aa, Pachyseris speciosa
MEKQKSRLRKVKRGYWRRKKQEDARRMNAQFELDPGRVYSDFRRVIDDQGEVAKPKYVHGQEDNESQRNVFSDAEEATTFWRSLWEAEGAGSVSAEWLDEVRDAIREKVPVPPEKDFDLSTKQAEKVIMKKRNWSAPGPDRIVNFWWKKANCLHVGIVSAFQVIAQSDQDVPLWFTEGRTSLIPKPGDFSSENQRPITCLNTVYKWFTSCLLEPVNSHLEDYDLMEGEQRGAKEKCSGTTDNLLIDRMVCQDSQRGRRNISMAWIDVRKAYDSVSHNWLREMFSVHRFPQWIGNLIERLSAKWNTRIFVRTRQGTELSERILFARGLPQGDALCPKLFTLCMNPVAWKLQASEGYRLSKPINTKITDLLYVDDLKVYAASEAKLKVVLREVQAAMGDIGLLWNEKKCAVVNVKRGCLQELAPGLKIDKQQLIKSLTEDSQYKFLGVLESIKQEDSLVLESAARVYLQRLSVIWSSPLSDHYKVVATNQFALPVLVYFMWTQVWPITELQRLDRESRKIMVENGGKHPLGISDLLYLPRRVGGRGLKSIEAEYKLTKVKAAARLYNNSDPTMELVRQYEEKARRTGRHSLIGDAQRFAEELGMKLELKYPEPSGTTEQGELIEGRKIGVWAKKAVQSRRFEDTKEKKWQGKLMTARWEDEKLDGECFSWMTEWRAAPTHTIAGIMELYEQLLPTRLYNSRKTKTTDDPDARCRMCGKAQESVAHVLSGCSVLAQTKYLSRHNAALKILFFELLKSYQLIEVIPPWYSPTQPKPFYENEQATVYWDVPVYADHTEVHANRVDARIVDKENQTVTLLEMSCPWVENREQKEKEKTFKYAPLRLELKQQYPGHKINQVNIIIDVLGATPTTTTTTILYFTPSLLQQKI

SEQ ID NO: 32516 - protein, 907 aa, Acropora nasuta
MEKQKSRLRKLKRGYWRRKKQEDARRMNAQFELDPGRVYSDFRRVIDGHSEVAKPKYVHGQEDNESQRNVFSDAEEATTFWRTLWEAQDAGNVKAEWLDEVRDAIREKVPVPPEKDFELSAKQAEKVIMKKRNWSAPGPDRIVNFWWKRVNCLHVGIVRAFQVIAQSDQDVPLWFTEGRTSLIPKPGEFSSENQRPITCLNTVYKWFTSCLLEPVNSHLEDYDLMEGEQRGAKEKCSGTTDNLLIDRMVCQDSQRGRRNISMAWIDVRKAYDSVSHNWLREMFSVHRFPQWIGNLIERLSAKWNTRISVRTRQGTELSERILFARGLPQGDALCPKLFTLCMNPIAWKLQASEGYRLSKPINTKITDLLYVDDLKVYAASEAKLKVVLREVQAAMGDIGLLWNERKCAVVNVKRGCLQELAPALKIDEQQLIKSLTEDSQYKFLGVLESIKQEDSLVLESAARVYLQRLSVIWSSPLSDHHKVVATNQFALPVLVYFMWTQVWPITELQRLDRESRKIMVENGGKHPLGTSDLLYLPRKVGGRGLKSIEAEYKLTKVKAAVRLYNNTDPTMQLVRQFEEKARRTGRHSLIGDAQRFAEELGMKLELRYPDPSGTTEQGEVIEGRKIGVWAKKAVQSKRFEDTKEKKWQGKLMTVRWEDEKLDGDCFSWMTEWRAAPTHTIAGIMELYEQLLPTKLYNSRKTKTTDDPDARCRLCGKAQESVAHVLSGCSVLAQTKYLSRHNAALKILFFELLKSYQLIEVIPPWYSPTQPKPSYENEQATVYWDVPVYADHIEVHANRVDARIVDKENQTVTLLEMSCPWVENREQKEKEKTLKYAPLRLELKQQYPGYRINQVNIIIDVLGGYSKELYSSVRDLLGAERSRECLRRMQKSVLSSSLNIVRSFKVLS

SEQ ID NO: 32517 - protein, 1246 aa, Pachyseris speciosa
MAEQATSQQTEQNNWLTAGRTRRLKWSSDMISDLLECKKRAQELASSEEPAQNTNGRKKGYMKILKELWDDLGYAGLNLTCQNLRDQAARMEKTMGNVRDTITRNAGNRSEKHRARESEELIMQEFRNEFIVSQRDTANLHSTASTQVPVGHNTSTSTQAPEGHSASPISTPISTSVCELLQLTEPILASVAKSPGDFSGRRHDTRTKQRPTGAEVKDVNAAVSVLLKHNKIPDPAQDPFGYLWIANCILYSVIVAFYISKDWKKGDGNRERTGKPKQSPKAKEEFEAQAREIRAKLSKAKAEIERLKSNKKITKKGKKNRLELLRECKTLSVAILVAYMEKQKSRLRKVKRGYWRRKKQEDARRMNAQFELDPGRVYSDFRGVIDDQGEVAKPKYVHGQEDNESQRNVFSDVEEATTFWRSLWEAEGAGSVSAEWLDEVRDAIREKVPVPPEKNFDLSTKQAEKVIMKKRNWSAPGPDRIVNFWWKKANCLHVGIVSAFQVIAQSDQDVPLWFTEGRTSLIPKPGDFSSENQRPITCLNTVYKWFTSCLLEPVNSHLEDYDLMEGEQRGAKEKCSGTTDNLLIDRMVCQDSQRGRRNISMAWIDVRKAYDSVSHNWLREMFSVHRFPQWIGNLIERLSAKWNTRIFVRTRQGTELSELILFARGLPQGDALCPKLFTLCMNPVAWKLQASEGYRLSKPINTKITDLLYVDDLKVYAASEAKLKVVLREVQAAMGDIGLLWNEKKCAVVNVKRGCLQELAPGLKIDKQQLIKSLTEDSQYKFLGVLESIKQEDSLVLESAARVYLQRLSVIWSSPLSDHYKVVATNQFALPVLVYFMWTQVWPITELQRLDRESRKIMVENGGKHPLGTSDLLYLPRRVGGRGLKSIEAEYKLTKVKAAARLYNNSDPTMELVRQYEEKARRTGRHSLIGDAQRFAEELGMKLELKYPEPSGTTEQGELIEGRKIGVWAKKAVQSKRFEDTKEKKWQGKLMTARWEDEKLDGECFSWMTEWRAAPTHTIAGIMELYEQLLPTRLYNSRKTKTTDDPDARCRMCGKAQESVAHVLSGCSVLAQTKYLSRHNAALKILFFELLKSYQLIEVIPPWYSPTQPKPFYENKQATVYWDVPVYADHTEVHANRVDARIVDKENQTVTLLEMSCPWVENREQKEKEKTFKYAPLRLELKQQYPGHKINQVNIIIDVLGGYSKELYSSVRDLLGAERSRECLRRMQKSVLSSSLNIARSFKVLS

SEQ ID NO: 32518 - protein, 907 aa, Pachyseris speciosa
MEKQKSRLRKVKRGYWRRKKQEDARRMNAQFELDPGRVYSDFRRVIEDQGEVAKPKYVHGQEDNESQRNVFSDAEEATTFWRSLWEAEGAGSVSAEWLDEVRDAIREKVPVPPEKDFDLSTKQAEKVIMKKRNWSAPGPDRIVNFWWKKANCLHVGIVSAFQVIAQSDQDIPLWFTEGRTSLIPKPGDFSSENQRPITCLNTVYKWFTSCLLEPVNSHLEDYDLMEGEQRGAKEKCSGTTDNLLIDRMVCQDSQRGRRNISMAWIDVRKAYDSVSHNWLREMFSVHRFPQWIGNLIERLSAKWNTRIFVRTRQRTELSERILFARGLPQGDALCPKLFTLCMNPVAWKLQASEGYRLSKPINTKITDLLYVDDLKVYAASEAKLKVVLREVQAAMGDIGLLWNEKKCAVVNVKRGCLQELAPGLKIDKQQLIKSLTEDSQYKFLGVLESIKQEDSLVLESAARVYLQRLSVIWSSPLSDHYKVVATNQFALPVLVYFMWTQVWPITELQRLDRESRKIMVENGGKHPLGTSDLLYLPRRVGGRGLKSIEAKYKLTKVKAAVRLYNNSDPTMELVRQYEEKARRTGRHSLIGDAQRFAEELGMKLELKYPEPSGTTEQGELIEGRKIGVWAKKAVQSKRFEDTKEKKWQGKLMTARWEDEKLDGECFSWMTEWRAAPTHTIAGIMELYEQLLPTRLYNSRKTKTTDDPDARCRMCGKAQESVAHVLSGCSVLAQTKYLSRHNAALKILFFELLKSYQLIEVIPPWYSPTQPKPFYENEQATVYWDVPVYADHTEVHANRVDAGIVDKENQTVTLLEMSCPWVENREQKEKEKTLKYAPLRLELKQQYPGHKINQVNIIIDVLGGYSKELYSSVRDLLGAERSRECLRRMQKSVLSSSLNIARSFKVLS

SEQ ID NO: 32519 - protein, 1246 aa, Pachyseris speciosa
MAEQATSQQTEQNNWLTAGRTRRLKWSSDMISDLLECKKRAQELASSEEPARNTNGRKKGYMKILKELWDDLGYAGLNLTCQNLRDQAARMEKTMGNVRDTITRNAGNRSEKHRARESEELIMQEFRNEFIVSQRDTANLHSTASTQVPVGHNTSTSTQAPEGHSASPISTPISTSVCELLQLTEPILASVAKSPGDFSGRRHDTRTKQRPTGAEVKDVNAAVSVLLKHNKIPDPAQDPFGYLWIANCILYSVIVAFYISKDWKKGDGNRERIGKPKQSPKAKEEFEAQAREIRAKLSKAKAEIERLKSDKKITKKGKKNRLELLRECKTLSVASLVVYMEKQKSRLRKVKRGYWRRKKQEDARRMNAQFELDPGRVYSDFRRVIDDQGEVAKPKYVHGQEDNESQTNVFSDAEEATTFWRSLWEEEGAGSVSAEWLDEVRDAIREKVPVPPEKDFDLSTKQAEKVIMKKRNWSAPGPDRIVNFWWKKANCLHVGIVSAFQVIAQSDQDVPLWFTEGRTSLIPKPGDFSSENQRPITCLNTVYKWFTSCLLEPVNSHLEDYDLMEGEQRGAKEKCSGTTDNLLIDRMVCQDSQRGRRNISMAWIDVRKAYDSGSHNWLREMFSVHRFPQWIGNLIERLSAKWNTRIFVRTRQGTELSERILFARGLPQGDALCPKLFTLCMNPVAWKLQASEGYRLSKPINTKITDLLYVDDLKVYAASEAKLKVVLREVQAAMGDIGLLWNEKKCAVVNVKRGCLQELAPGLKIDKQQLIKSLTEDSQYKFLGVLESIKQEDSLVLESAARVYLQRLSVIWSSPLSDHYKVVATNQFALPVLVYFMWTQVWPITELQRLDRESRKIMVENSGKHPLGTSDLLYLPRRVGGRGLKSIEAEYKLTKVKAAARLYNNSDPTMELVRQYEEKARRTGRHSLIGDAQRFAEELGLKLELKYPEPSGTTEQGELIEGRKIGVWAKKAVQSKRFEDTKEKKWQGKLMTARWEDEKLDGECFSWMTEWRAAPTHTIAGIMELYEQLLPTKLYNSRKTKTTDDPDARCRMCGKAQESVAHVLSGCSVLAQTKYLSRHNAALKILFFELLKSYQLIKVIPPWYSPTQPKPFYENEQATVYWDVPVYADHTEVHANRVDARIVDKENQSVTLLEMSCPWVENREQKEKEKTFKYAPLRLELKQQYPGHKINQVNIIIDVLGGYSKELYSSVRDLLGAERSRECLRRMQKSVLSSSLNIARSFKVLS

SEQ ID NO: 32520 - protein, 1185 aa, Pachyseris speciosa
MKILKELWDDLGYAGLNLTCQNLRDQAARMEKTMGNVRDTITRNAGNRSEKHRARESEELIMQEFRNEFIVSQRDTANLHSTASTQVPVGHNTSTSTQAPEGHSASPISTPISTSVCELLQLTEPILASVAKSPGDFSGRRHDTRTKQRPTGAEVKDVNAAVSVLLKHNKIPDPAQDPFGYLWIANCILYSVIVAFYISKDWKKGDGNRERIGKPKQSPKAKEEFEAQAREIRAKLSKAKAEIERLKSNKKITKKGKKNRLELLRECKTLSVASLVAYMEKQKSRLRKVKRGYWRRKKQEDARRMNAQFELDPGRVYSDFRRVIEDQGEVAKPKYVHGQEDNESQRNVFSDAEEATTFWRSLWEGEGAGSVSAEWLDEVRDAIREKVPVPPEKDFDLSTKQAEKVIMKKRNWSAPGPDRIVNFWWKKANCLHVGIVSAFQVIAQSDQDVPLWFTEGRTSLIPKPGDFSSENQRPITCLNTVYKWFTSCLLEPVNSHLEDYDLMEGEQRGAKEKCSGTTDNLLIDRMVCQDSQRGRRNISMAWIDVRKAYDSVSHNWLREMFSVHRFPQWIGNLIERLSAKWNTRIFVRTRQGTELSERILFARGLPQGDALCPKLFTLCINPVAWKLQASEGYRLSKPINTKITDLLYVDDLKVYAASEAKLKVVLREVQAAMGDIRLLWNEKKCAVVNVKRGCLQELAPGLKIDKQQLIKSLTEDSQYKFLGVLESIKQEDSLVLESAARVYLQRLSVIWSSPLSDHYKVVATNQFALPVLVYFMWTQVWPITELQRLDRESRKIIVENGGKHPLGTSDLLYLPRRVGGRGLKSIEAEYKLTKVKAAARLYNNSDPTMELVRQYEEKARRTGRHSLIGDAQRFAEELGLKLELKYPEPSGTTEQGELIEGRKIGVWAKKAVQSKRFEDTKEKKWQGKLMTARWEDEKLDGECFSWMTEWRAAPTHTIAGIMELYEQLLPTKLYNSRKTKTTDDPDARCRMCGKAQESVAHVLSGCSVLAQTKYLSRHNAALKILFFELLKSYQLIEVIPPWYSPTQPKPFYENEQATVYWDVPVYADHTEVHANRVDARIVDKENQTVTLLEMSCPWVENREKKEKEKTFKYAPLRLELKQQCPGHKINQVNIIIDVLGGYSKELYSSVRDLLGAERSRECLRRMQKSVLSSSLNIARSFKVLS

SEQ ID NO: 32521 - protein, 907 aa, Acropora yongei
MEKQKSRLRKVKRGYWRKKKQEDARRMNAQFELDPGRVYSDFRRVIDDQGEVAKPKYVHGQEDNESQRKVFSDAKEATTFWRSLWEAEGEGCVRAEWLNEVRDAIREKVPVPPEKDFDLSAKQAEKVIMKKRNWSAPGPDRIVNFWWKRANCLHVGIVRAFQVIAQSDQDVPLWFTEGRTTLIPKPGEFSSENQRPITCLNTVYKWFTSCLLEPVNSHLQDYDLMEGEQRGAKEKCSGTTDNLLIDRMVCQDSQRGRRNISMAWIDVRKAYDSVSHNWLREMFSVHRFPQWIGNLIERLSAKWNTRIFVRTRQGTELSQRILFARGLPQGDALCPKLFTLCMNPIAWKLQASEGYRLSKPINTKITDLLYVDDLKVYAASEAKLKVVLREVQAAMGDIGLLWNERKCAVVNVKRGCLQELAPGLKIDKQQLIKSLTEDSQYKFLGVLESIKQEDSLVLESATKVYLQRLSVIWSSPLSDHYKVVATNQFALPVLVYFMWTQVWPITELQRLDRESRKIMVENGGKHPLGTSDLLYLPRRVGGRGLKSIEAEYKLTKVKAAVRLYNNLDPTMELVRQFEEKARRTGRHSLIGDAQRFAEELGMKLELSYPDPSGTTEQGEVIEGRKIGVWAKKAVQSKRFEDTKEKKWQGKLMTARWEDEKLDGECFSWMTEWRAAPTHTIAGIMELYEQLLPTRLYNSRKTKTTDDPDARCRMCGKAQESVAHVLSGCSVLAQTKYLSRHNAALKILFFELLKSYQLIEVIPPWYSPTQPKPSYENEQATVYWDVPVYADHIEVHANRVDARIVDKENQTVTLLEMSCPWVENREQKEKEKTFKYAPLRLELKQQYPGYKINQVNIIIDVLGGYSKEVYSSVRDLLGAERSREYLRRMQKSVLSSSLNIARSFKVLI

SEQ ID NO: 32522 - protein, 1246 aa, Pachyseris speciosa
MAEQATSQQTEQNNWLTAGRTRRLKWSSDMISDLLECKKRAQELASSEEPARNTNGRKKGYMKILKELWDDLGYAGLNLTCQNLRDQAARMEKTMGNVRDTITRNAGNRSEKHRARESEELIMQEFRNEFIVSQRDTANLHSTASTQVPVGHNTSTSTQAPEGHSASPISTPISTSVCELLQLTEPILASVAKSPGDFSGRRHDTRTKQRPTGAEVKDVNAAVSVLLKHNKIPDPAQDPFGYLWIANCILYSVIVAFYISKDWKKGDGNRERIGKPKQSPKAKEEFEAQAREIRAKLSKAKAEIERLKSNKKITKKGKKNRLELLRECKTLSVASLVAYMEKQKSRLRKVKRGYWRRKKQEDARRMNAQFELDPGRVYSDFRRVIDDQGEVAKPKYVHGQEDNESQRNVFSDAEEATTFWRSLWEGEGAGSVSAEWLDEVRDAIREKVPVPPEKDFDLSTKQAEKVIMKKRNWSAPGPDRIVNFWWKKANCLHVGIVSAFQVIAQSDQDVPLWFPEGRISLIPKPGDFSSENQRPITCLNTVYKWFTSCLLEPVNSHLEDYDLMEGEQRGAKEKCSGTTDNLLIDRMVCQDSQRGRRNISMAWIDVRKAYDSVSHNWLREMFAVHRFPQWIGNLIERLSAKWNTRIFVRTRQGTELSERILFARGLPQGDALCPKLFTLCMNPVAWKLQASEGYRLSKPINTKITDLLYVDDLKVYAASEAKLKVVLREVQAAMGDIGLLWNEKKCAVVNVKRGCLQELAPGLKIDKQQLIKSLTEDSQYKFLGFLESIKQEDSLVLESAARVYLQRLSVIWSSPLSDHYKVVATNQFALPVLVYFMWTQVWPITELQRLDRESRKIMVENGGKHPLGTSDLLYLPRRVGSRGLKSIEAEYKLTKVKAAARLYNNSDPTMELVRQYEEKARRTGRHSLIGDAQRFAEELGMKLELKYPEPSGTTEQGELIEGRKIGVWAKKAVQSKRFEDTKEKKWQGKLMTARWEDEKLDGECFSWMTEWRAAPTHTIAGIMELYEQLLPTKLYNSRKTKTTDDPDARCRMCGKAQESVAHVLSGCSVLAQTKYLSRHNAALKILFFELLKSYQLIEVIPPWYSPTQLKPFYENEQATVYWDVPVYADHTEVHANRVDARIVDKENQTVTLLEMSCPWVENREQKEKEKTFKYAPLRLELKQQYPGHKINQVNIIIDVLGGYSKELYSNVRDLLGAERSRECLRRMQKSVLSSSLNIARSFKVLS

SEQ ID NO: 32523 - protein, 1217 aa, Pachyseris speciosa
MISDLLECKKRAQELASSEEPAGNTNGRKKGYMKILKELWDDLGYAGLNLTCQNLRDQAARMEKTMGNVRDTITRNAGNRSEKHRARESEELIMQEFRNEFIVSQRDTANLHSTASTQVPVGHNTSTSTQAPEGHSASPISTPISTSVCELLQLTEPILASVAKSPGDFSGRRHDTRTKQRPTGAEVKDVNVAVSVLLKHNKIPDPAQDPFGYLWIANCILYSVIVAFYISKDWKKGDGNRERIGKPKQSPKAKEEFEAQAREIRAKLSKAKAEIERLKSNKKITKKGKKNRLELLRECKTLSVASLVAYMEKQKSRLRKVKRGYWRRKKQEDARRMNAQFELDPGRVYSDFRRVIDDQGEVAKPKYVHGQEDNESQRNVFSDAEEATTFWKSLWEGEGAGSVSAEWLDEVRDAIREKVPVPLEKDFDLSTKQAEKVIMKKRNWSAPGPDRIVNFWWKKANCLHVGIVSAFQVIAQSDQDVPLWFTEGRTSLIPKPGDFSSENQRPITCLNTVYKWFTSCLLEPVNSHLEDYDLMEGEQRGAKEKCSGTTDNLLIDRMVCQDSQRGRRNISMAWIDVRKAYDSVSHNWLREMFSVHRFPQWIGNLIERLSAKWNTRIFVRTRQGTELSERILFARGLPQGDALCPKLFTLCMNPVAWKLQASEGYRLSKPINTKITDLLYVDDLKGYAASEAKLKVVLREVQAAMGDIGLLWNEKKCAVVNVKRGCLQELAPGLKIDKQQLIKSLTEDSQYKFLGVLESIKQEDSLVLESAARVYLQRLSVIWSSPLSDHYKVVATNQFALPVLVYFMWTQVWPITELQRLDRELRKIMVENGGKHPLGTSDLLYLPRRVGGRGLKSIEAEYKLTKVKAAARLYNNSDPTMELVRQYEEKARRTGRHSLIGDAQRFAEELGMKLELKYPEPSGTTEQGELIEGRKIGVWAKKAVQSKRFEDTKEKKWQGKLMTARWEDDKLDGECFSWMTEWRAAPTHTIAGIMELYEQLLPTRLYNSRKTKTTDDPDARCRMCGKAQESVAHVLSGCSVLAQTKYLSRHNAALKILFFELLKSYQLIEVIPPWYSPTQPKPFYENEQATVYWDVPVYADHTEVHANRVDARIVDKENQTVTLLEMSCPWVENREQKEKEKTFKYAPLRLELKQQYPGHKINQVNIIIDVLGGYSKELYSSVRDLLGAERSRECLRRMQKSVLSSSLNIARSFKVLG

SEQ ID NO: 32524 - protein, 907 aa, Acropora hyacinthus
MEKQKSRLRKLKRGYWRRKKQEDARRMNAQFELDPGRVYSDFRRVIDDHSEVAKPKYVHGQEDNESQRNVFSDAEEATTFWRTLWEAQDAGNVKAEWLDEVRDAIREKVPVPPEKDFELSAKQAEKVIMKKRNWSAPGPDRIVNFWWKRVNCLHVGIVRAFQVIAQSDQDVPLWFTEGRTSLIPKPGEFSSENQRPITCLNTVYKWFTSCLLEPVNSHLEDYDLMEGEQRGAKEKCSGTTDNLLIDRMVCQDSQRGRRNISMAWIDVRKAYDSVSHNWLREMFSVHRFPQWIGNLIERLSAKWNTRISVRTRQGTELSERILFARGLPQGDALCPKLFTLCMNPIAWKLQASEGYRLSKPINTKITDLLYVDDLKVYAASEAKLKVVLREVQAAMGDIGLLWNERKCAVVNVKRGCLQELAPALKIDEQQLIKSLTEDSQYKFLGVLESIKQEDSLVLESAARVYLQRLSVIWSSPLSDHHKVVATNQFALPVLVYFMWTQVWPITELQRLDRESRKIMVENGGKHPLGTSDLLYLPRKVGGRGLKSIEAEYKLTKVKAAVRLYNNTDPTMQLVRQFEEKARRTGRHSLIGDAQRFAEELGMKLELRYPDPSGTTEQGEVIEGRKIGVWAKKAVQSKRFEDTKEKKWQGKLMTVRWEDEKLDGDCFSWMTEWRAAPTHTIAGIMELYEQLLPTKLYNSRKTKTTDDPDARCRLCGKAQESVAHVLSGCSVLAQTKYLSRHNAALKILFFELLKSYQLIEVIPPWYSPTQPKPSYENEQATVYWDVPVYADHIEVHANRVDARIVDKENQTVTLLEMSCPWVENREQKEKEKTLKYAPLRLELKQQYPGYRINQVNIIIDVLGGYSKELYSSVRDLLGAERSRECLRRMQKSVLSSSLNIVRSFKVLS

SEQ ID NO: 32525 - protein, 881 aa, Acropora muricata
MNAQFELDPGRVYSDFRRVIDDHSEVAKPKYVHEQEDNESQRNVFSDAEEATTFWRTLWEAQDAGNVKAEWLDEVRDAIREKVPVPPEKDFELSAKQAEKVIMKKRNWSAPGPDRIVNFWWKRVNCLHVGIVRAFQVIAQSDQDVPLWFTEGRTSLIPKPGEFSSENQRPITCLNTVYKWFTSCLLEPVISHLEDYDLMEGEQRGAKEKCSGTTDNLLIDRMVCQDSQRGRRNISMAWIDDRKAYDSVSHNWLREMFSVHHFPQWIGNLIERLSAKWNTRISVRTRQGTELSERILFARGLPQGDALCPKLFTLCMNPIAWKLQASEGYRLSKPIDTKITDLLYVDDLKVYAASEAKLKVVLREVQAAMGDIGLLWNERKCAVVNVKRGCLQELAPALKIDEQQLIKSLTEDSQYKFLGVLESIKQEDSLVLESAARVYLQRLSVIWSSPLSDHHKVVATNQFALPVLVYFMWTQVWPITELQRLDRESRKIMVENGGKHPLGTSDLLYLPRKVGGRGLKSIEAEYKLTKVKAAVRLYNNSDPTMQLVRQFEEKARRTGRHSLIGDAQRFAEELGMKLELRCPDPSGTTEQGEVIEGRKIGVWAKKAVQSKRFEDTKEKKWQGKLMTVRWEDEKLDGDCFSWMTEWRAAPTHTIAGIMELYEQLLPTKLYNSRKTKTTDDPDARCRLCGKAQESVAHVLSGCSVLAQTKYLSRHNAALKILFFELLKSYQLIEVIPPWYSPTQPKPSYENEQATVYWDVPVYADHIEVHANRVDARIVDKENQTVTLLEMSCPWVENREQKEKEKTLKYAPLRLELKQQYPGYRINQVNIIIDVLGGYSKELYSSVRDLLGAERSRECLRRMQKSVLSSSLNIVRSFKVLS

SEQ ID NO: 32526 - protein, 1244 aa, Pachyseris speciosa
MAEQATSQQTEQNNWLTAGRTRRLKWSSDMISDLLECKKRAQELASSEEPARNTNGRKKGYMKILKELWDDLGYAGLNLTCQNLRDQAARMEKTMGNVRDTITRNAGNRSEKHRARDSEELIMQEFRNEFIVSQRDTANLHSTASTQVPVGHNTSTSTQAPEGHSASPISTPISTSVCELLQLTEPILASVAKSPGDFSGRRHDTRTKQRPTGAEVKDVNAAVSVLLKHNKIPDPAQDPFGYLWIANCILYSVIVAFYISKDWKKGDGNRERIGKPKQSPKAKEEFEAQAREIRAKLSKAKAEIERLKSNKKITKKGKKNRLELLRECKTLSVASLVAYMEKQKSRLRKVKRGYWRRKENARRMNAQFELDPGRVYSDFRRVIDDQGEVAKPKYVHGQEDNESQRNVFSDAEEATTFWRSLWEGEGAGSVSAEWLDEVRDAIREKVPVPPEKDFDLSTKQAEKVIMKKRNWSAPGPDRIVNFWWKKANCLHVGIVSAFQVIAQSDQDVPLWFTEGRTSLIPKPGDFSSENQRPITCLNTVYKWFTSCLLEPVNSHLEDYDLMEGEQRGAKEKCSGTTDNLLIDRMVCQDSQRGRRNISMAWIDVRKAYDSVSHNWLREMFSVHRFPQWIGNLIERLSAKWNTRIFVRTRQGTELSERILFARGLPQGDALCPKLFTLCMNPVAWKLQASEGYRLSKPINTKITDLLYVDDLKVYAASEAKLKVVLREVQAAMGDIGLLWNEKKCAVVNVKRGCLQELAPGLKIDKQQLIKSLTEDSQYKFLGVLESIKQEDSLVLESAARVYLQRLSVIWSSPLSDHYKVVATNQFALPVLVYFMWTQVWPITELQRLDRESRKIMVENGGKHPLGTSDLLYLPRRVGGRGLKSIEAEYKLTKVKAAARLYNNSDPTMELVRQYEEKARRTGRHSLIGDAQRFAEELGMKLELKYPEPSGTTEQGELIEGRKIGVWAKKAVQSKRFEDTKEKKWQGKLMTARWEDEKLDGECFSWMTEWRAAPTHTIAGIMELYEQLLPTKLYNSRKTKTTDDPDARCRMCGKAQESVAHVLSGCSVLAQTKYLSRHNAALKILFFELLKSYQLIEVIPPWYSPTQPKPFYENEQATVYWDVPVYADHTEVHANRVDARIVDKENQTVTLLEMSCPWVENREQKEKEKTFKYAPLRLELKQQYPGHKINQVNIIIDVLGGYSKELYSSVRDLPGAERSRECLRRMQKSVLSSSLNIARSFKVLS

SEQ ID NO: 32527 - protein, 1117 aa, Pachyseris speciosa
MQEFRNEFIVSQRDTANLHSTASTQVPVGHNTSTSTKAPEGHSASLISTPISTSVCELLQLTEPILASVAKSPGDFSGRRHDTRTKQRPTGAEVKDVNAAVSVLLKHNKTPDPAQDPFGYLWIANCILYSVIVAFYISKDWKKGDGNRERIGKPKQSPKAKEEFEAQAREIRAKLSKAKAEIERLKSNKKITKKGKKNRLELLRECKTLSVASLVAYMEKQKSRLRKVKRGYWRRKKQEDARRMNAQFELDPGRVYSDFRRVIDDQGEVAKPKYVHGQEDNESQRNVFSDAEEATTFWRSLWEEEGAGSVSAEWLDEVRDAIREKVPVPPEKDFDLSTKQAEKVIMKKRNWSAPGPDRIVNFWWKKENCLHVGIVSAFQVIAQSDQDVPLWFTEGRTSLIPKPGDFSSENQRPITCLNTVYKWFTSCLLEPVNSHLEDYDLMEGEQRGAKEKCSGTTDNLLIDRMVCQDSQRGRRNISMAWIDVRKAYDSVSHNWLREMFSVHRFPQWIGNLIERLSAKWNTRIFVRTRQGTELSERILFARGLPQGDALCPKLFTLCPVAWKLQASEGYRLSKPINTKITDLLYVADLKVYAASEAKLKVVLREVQAAMGDIGLLWNEKKCAVVNVKRGCLQELAPGLKIDKQQLIKSLTEDSQYKFLGVLESIKQEDSLVLESAARVYLQRLSVIWSSPLSDHYKVVATNQFALPVLVYFMWTQVWPITELQRLDRESRKIMVENGGKHPLGTSDLLYLPRRVGGRGLKSIEAEYKLTKVKAAARLYNNSDLTMELVRQYEEKARRTGRHSLIGDAQRFAEELGMKLELKYPEPSGTTEQGELIEGRKIGVWAKKAVQSKRFEDTKEKKWQGKLMTARWEDEKRDGECFSWMTEWRAAPTPMELYEQLLPTKLYNSRKTKTTDDPDARCRMCGKAQESVAHVQSGCSVLAQTKYLSRHNAALKILFFELLKSYQLIEVIPPWYSPTQPKPFYENEQATVYWDVPVYADHTEVHANRVDARIVDKENQTVTLLEMSCPWVENREQKEKEKTFKYAPLRLELKQQYPGHKINQVNIIIDVLGGYSKELYSSVRDLLGAERSRECLRRMQKSVLSSSLNIARSFKVLS

SEQ ID NO: 32528 - protein, 1210 aa, Alatina alata
MENNSVRKSYRIARRAGQQGARLSVGNQAEIEKCTTGTNSSQNPQSNQNENSTQPGPMGTNNTRNNQKEKRQKWTREEYKEVMKAYYKAMKNPSKDSNTIQTYSIWREGNPNKRLNIDPNKLANVRRDIQKNNRLTEAELEKIRNEIEQANEQQIEQIEQIRIDGERVLDMEHQEQTEEMRVGSQVNDVAIENDDETSDGNQEMIEMKNEIKEKWQSIQNIEMKDRTRLPKIRKDKKVKQLLKTANTAIEKIKAEEDQLDISQINQLTYATATIITERIGLKTARKNSKNGDRKQPLWKRKIEKDIRSKRADLSTLEEMSRDNISEQKRRKMIRKYSIRNQEQLALAKEKLKQMIQAKAQRIRRYDKRSKQYRQNKIFDTDATRFYRELGKKQINVEDPPPQEEVERFWRLIWEDEKHHNEIAEWIIDQENMMNEIEEQEWKDISKVEVTIALKSSNNWKSPGIDQVPNFWMKNLEVIHEDLAKCYSKITKTPDESPSWLTQGITYLLPKTNETKNPKNYRPITCLPTMYKILTSIIADRMYKYLEDKDLLPKEQKGCRRGSYGCKDQLLIDKMILEDCRKRSKNLSTAWIDYRKAFDSVPHSWIIKVMEMFKLSPTLINFMKNSMSMWKTTLTLNHTTGTMIADPISIKSGIFQGDSLSSLLFCLSLAPLSKMLNETNAGYDVQGEKINHLFYMDDLKLFARNDDQLEGLLNTVKKFSDDIRMKFGLDKCAKASFKRGKLSQTTPIRLDLDTEIQELDHESSYKYLGVHEGDGIQQSKMKETIRKEYCRRVKMILKSELNAQNRIQAINSLAVPVVTYSFNIINWKKEEIRKLDRKTRKLLTIHRMHHPKADVERIYIKRNAGGRGLIQLEASLDVATVGLEAYLKESKDSLLKAVYKHEKSKKLYSIHKEAAKTIRSLNVDMKNIDDKVTPCQYAKEIKQQTRFKIMKKMNERWREKPLHGIYPKRMDQADVDEEKTHAWLRSAGLKGETEGIIIAAQDQSLPTRNYQNKIMKTDVDSKCRLCHKYDETIDHIVSGCEVLAKQEYLERHNNALRYIHWLLCKKYKIETSRQWYEHKPQVVTETESVKILWDMPIQTDREIKANRPDIIVKDKEENIFLLIDMAVPSERNLASKENEKKSKYKDLEIEISRMWNVRTSTIPVIVGSLGTIKRGMQYHLKDLNLKSLRLEILQKIVLLGSMRIVRKFLAL

SEQ ID NO: 32529 - protein, 1327 aa, Anelosimus studiosus
MLFQSNEALTSHLTTHNIDSGNNSSNAVDNASRTPTTSRPNILPNDRSFKCDRCPHTSTTVKGLSIHKFHAHRVPIGKPDPKGSTTIPPVSQVRATDLTPSATSIPRLQSTSSQPAAAVNQGASNIARNNEELMVTFPTNQYQKCTESGCSSTFYCKTWFTTKRSIMRHLFTDHGIKIRKTIPRCSYCNSNITGRKPTAHPCFKSRPYMNKDTVSSKYKCRQCNFTATSAKGLDNHVYSHGTQSAKAAQGNLIRPDNRIANQAARRANLRHQNSNKQDANLQGGRQAPNPTNINDPGPSTSRQDGRRNLERRHPADKQVINEGSIITHNRFDLLTPDPSPDEAPDEPQSQLIDTQINSDDFTNLDDGIEIGGSQDIHLLRQPQATDQIPDDFPIRDCLDLLPDNFDNEQVMVFSDFCDCVNVVKCRIAEYVKLPPPKEAQAYSSQQHQATDEVAEATRIQKAYRRNKRRAMRDITGHKSSTCPIPKETIEAHFRACNVEPSIDLSLYDQISAAPDEVCMDPFTPEEVQARLKKFANTAPGPDRLTFQHLKAADPECRVYTRIFNHCLKYGRIPDDWKISKVILIPKQGDPNIISNWRPIALSDTLYKLFTGCLCTRLIGWFTEHNVLSHCQKGFMPFDGVFEHNYVLNTRIRNAVDNAEDICLASLDLSNAFGSIHHGAIKQALSANGAGDRFTSLIDQIYKDNFFTVNSKDGPTDGIQCKVGVKQGDPISGPLFNLAIDPIVRRLQGDQVPPSSQAPNLPVSPSPSIEDFTTNNDVRRPSSTDPALPLHHVLAYADDLNIIASSPEELQSLLDRAANDIAMSGIRINEGKCFSLHISGRKPTGTRPTVFTINSHNIQALGDSEQKKFLGNPVGFRLVDSNAKLNDYLKLAEAILTSKLAPWQRLDALKTFFYPALLFDMRNGSFHKQSWAKVDHFIRPYLKETLGLPLEAVNSYLYGSTKAGLIGIPVCAEDSDFALIDSAYKLLTSRDQLIRDMAWEDLYNVVSKRYKITPTNEDLCKFLSEGISDDDRNTSNSRRSVWSSARNASRRVGVTWFLSGGNLHIKFDNYEIIPKNRTKVMWNLRDSYRHKNADQLISKCSQGKTAEALAMDPACSHFLSDGKYTRFCDWRFIHTARLNLHQLNAVKHTRGNNHDKTCRRCHAQPETLPHVLQHCMRSSTLLKARHNAIVNRIKTAATPKFQIIGEDQELEGVRGLRPDLVIAKGDKCYLIDPTVVFDDGRARFDSARQNKISKYQPLVTALRRKFKTVEVHPVVCGALGSWDPRNHSIFRKICSKRYGYLMKKLIISDNIRYARNIYTEFITGQPQQ

SEQ ID NO: 32530 - protein, 1083 aa, Pandalus platyceros
MSGKPTSCGTGFRPATTSHQGSSSSCPSPLPGGRPGVDKSLIPVADQNQVSDHSVDRATGPATTGQGVASEGLCPICRKQYKTHKGMRVHWRAMHPDTFHSESIQRIAGGRNHPWGDEELRLMAKFEAENSNVRFINALIKEKLLPERTADMLRGKRKSPRYREMVKEASAALALDTKLGKSVKDAQLNVVRKVDGASGVNPAPAPRAKPIRLAKTRASNVNVNVKSCRVVLSKVNVKESLSEGARPRVPSPPSSDPGDSGDEGSGSSNPSSSPPSSDDEDPPGDISPDDIDRLKTGLFGHVRRWTPRRVGNRRVGPMSRKVRKRRQFAAIQNAWKKDRGKTVRDILAGKDPLSDPQYPDGTERFWSDLFTRESPPSYTQLQEGGDLDILESITLEEVEWALKSIKPSTAPGPDGIRLADVLSVDRASLINLFNTVIRAPDSTAAWAEGRTTLIPKSDSPVHPGEYRPITVGSILTRILHKILARRLAMRLPPSQRQKGFQPEDGVGANTLLLKKLIAKAKSEPSNLQIAFVDFKKAFDSVGHSGMLDAARAAGLSERSVLYLRGYYSKINTHILNSHVKITRGVMQGDPISPALFNIVLEKVFKDLPQEVGVEIEGERIKFMAFADDVVLVASSRPGLQALLDAFLTSASTMGLEAGLGKCATCGIVKDGKRKTWFSDDRAFSYQGTALPVVALQGFYKYLGIEIGIVLRETGQRVAGRIRNALGLLQQAPLKPQQKTWALKICVLPKFSHLLCQDLVKLYHLKAIDIEVRKFLRKALHLPRDTPLGAFHASHSEGGLGIPCFVTQIPILRNSVLERLSFSMDQTIARLAVESPRARVVEGPEPMHWANKLHSSVDGCGLKEAHLTPVSSSWVGDGTLLLRGASFIQSLKCRLGVLTTPARSARGREASPNCDLGCGVPGTLHHILQNCPRVQPWRITRHDNTLKLLSKLLREKGLSVEEEPRINTPAGLRKPDLLVWGSSFAIILDAQICSDSNAGNLGVAHNAKVVKYNQPSILTYAKNKTGFDPSVSSLTINWRGVIAKESLLTLKTLKVTKRETKLLIVRSLAGSVSIYSNYMCTAGA

SEQ ID NO: 32531 - protein, 1060 aa, Rhopilema esculentum
MLRPRLLWLLIISVVCSYCGKDFQVLGRHTWRCRKRLPESAGPNNTINITSESDKNALQTSVIVKCVCGKECSGAKGLKMHQRRCRVIEGLEDQPLDFENSNIGANQSLISHTEVTTDTLCDYEIKPGVRLPKTDDQWNTANNYFKSIFINTKIEKVSLDSTIKFMNDSIYNYFKHSYGTVNGTRDNDLLNKYKDCSKQSLKKELKRLKLSSAPPTEIKFVSRLLRSKLSQDRNICSSATTSQDYDKLISKNLWSFVKNVIEKQSAVLPSFSVNRCTQFFVKMFSAVFPDRQFVIPPWIPSLSQPSVPFDTQPPSYEKVTKVIRKMKSAGSPCPLDKISIICFKRCPYLRSFLTEIIRVVWTTGHVPSEWKKACTVLVYKKGSIDDPANFRPITLESVPLKIFTSCLRDALFSFLKQNNFIEHEIQKGFTPNISGVLEHTSLMAHIINKARIKQRSVVVTLLDLKNAFGEVHHNLIIKAMDYHHIPAHFQDLVSNLYTDFHTSIITDNFRSPAIPVKRGVLQGDCLSPLIFNLCFNTFIQLVKQDKYKQLGFSPHDGNDRLFNPVHWFQFADDAAVVTSDERENQLLLNCFTRWCQWANMIIRVDKCITFGIKKFATKSAQFQPKLFINNDPVPFVKHGESFKYLGRFFNYDMKNQEHKDHLTSSLREMLKVIDSLKIHPRNKILLFNQYILSKLSWDLTVANLSKTWVCENLDQLVTKFVRQWLELPISSTLSGIVLSRKHFGLELLLPSVKFQQCQTVLRNSLKSSPNENIKSLWMNTNYGPNIQFDAYKNTKAVLKCVRDEHTEKLKTQLTSQGFIISFLLEHSYTKLTSLWSAAQSKLPKNIFNFTIRYLNNTLATRNNLCLWKISSSPDCSFCLQPESLLHVVAGCNKYLEQGRFTWRHDSALHFIASSFQCIRDVFIYADIPAYLSPCIITGDSFRPDMLIKTASNCLYVIELTVGFETNLDNNASRKAEKYRSLLKELRPKFKKVNFVNLSISCLGIFGNSCDSFIDMCDELKLDYQHRNFIIKKLSAIIIRTSYYIFCMRNKTWTNPELLSF

SEQ ID NO: 32532 - protein, 1060 aa, Rhopilema esculentum
MLRPRLLWLLIISVVCSYCGKDFQVLGRHTWRCRKRLPESAGPNNTINITSESDKNALQTSGIVKCVCGKECSGAKGLKMHQRRCRVIEGLEDQPLDFENSNIGANQSLISHTEVTTDTLCDYEIKPGVRLPKTDDQWNTANNYFKSIFINTKIEKVSLDSTIKFMNDSIYNYFKHSYGTVNGTRDNDLLNKYKDCSKQSLKKELKRLKLSSAPPTEIKFVSRLLRSKLSQDRNICSSATTSQDYDKLISKNLWSFVKNVIEKQSAVLPSFYVSRCTQFFVKMFSAVFPDRQFVIPPWIPSLSQPSVPFDTQPPSYEKVTKVIRKMKSAGSPCPLDKISIICFKRCPYLRSFLTEIIRVVWTTGHVPSEWKKACTVLVYKKGSIDDPANFRPITLESVPLKIFTSCLRDALFSFLKQNNFIEHEIQKGFTPNISGVLEHTSLMAHIINKARIKQRSVVVTLLDLKNAFGEVHHNLIIKAMDYHHIPAHFQDLVSNLYTDFHTSIITDNFRSPAIPVKRGVLQGDCLSPLIFNLCFNTFIQLVKQDKYKQLGFSTHDGNDRLFNPVHWFQFADDAAVVTSDERENQLLLNCFTRWCQWANMIIRVDKCITFGIKKFATKSAQFQPKLFINNDPVPFVKHGESFKYLGRFFNYDMKNQEHKDHLTSSLREMLKVINSLKIHPRNKILLFNQYILSKLSWDLTVANLSKTWVCENLDQLVTKFVRQWLELPISSTLSGIVLSRKHFGLELLLPSVKFQQCQIVLRNSLKSSLNENIKSLWMNTNYGPNIQFDAYKNTKAVLKCVRDEHTEKLKTQLTSQGFIISFLLEHSYTKLTSLWSAAQSKLPKNIFNFTIRYLNNTLATRNNLCLWKISSSPDCSFCLQPESLLHVVAGCNKYLEQGRFTWRHDSALHFIASSFQCIRDVFIYADIPAYLSPCIITGDSFRPDMLIKTASNCLYVIELTVGFETNLDNNASRKAEKYRSLLKELRPKFKKVNFVNLSISCLGIFGNSCDSFIDMCDELKLDYQHRNFIIKKLSAIIIRTSYYIFCMRNKTWTNPELLSF

SEQ ID NO: 32533 - protein, 1333 aa, Rhegmatorhina hoffmannsi
MAPRLCLVHVSESTQTDLRDWWGASAGDPKISTANLTVLENNVSLAQTLFFYNSAFLTERFEGFEPPTRSECLEGYPEVFEAFIPTGAAAGTTTGPAGEGGERGKNGDGSAVPPPPARGETALPPPAGGDPVPENAGVDLLPHGSEVDLVPRREGTDPAPVSGSRKDVPAGRDGPTIVVKVPDRNPPCPCCGTRVATVSRLVEHLKTAHGKRKIVFQCAKCGRENEKFQSIACHYPQCKGDSVHIPVGEWCCELCGRDFKSKIGLSQHKRLAHPETRNEERIAASQPKQTSNRGAHRRCWTEEEEELLVKLSKEFEGKKFITKLISEHIPGKTLKQIRDKRRLLEQRGVINGCDKGTAVDNRGDYRVGGATREPKDVARGVGEVAREPKGVARRAGEVSKGTDRVARQARSGLLRAHYLRTAGDWVATQKISTYGKAFTELATGQKDPLSVINEASQDCFECLGEMCLNSRQPSTKFKQKNKGPNRRETSATKWMKKRAVRRGKFLRFQRLFYLDRGKLARILLDDLESMKCEVPLKELYSVFQSRWESPGAFQSLGTFTSKGKAGNEAFHAMITAKEVSKNVGEMSKNSAPGPDGITLQDLSKMDPQYSLTAEIFNLWLTSGKIPDMVRGCRTVLIPKSTRPERLKDINNWRPITIASIILRLFSRVLTARLAKACPINPRQRGFIRAAGCSENLKLLQLLIHRAKSEHRELGVVFVDIAKAFDTVSHQHIIMSLKQKGVDQHIIDLIEDMYKNIYTRIRTEDGETDAIEMRVGVKQGDPMSPLLFNLALDPLICKLEDRGNGFKLGRKSITAMAFADDLVLLSGSWEGMQKNIEILETFCDLTGLKTQGEKCHGFLIKPTRDSYTINDCLAWTVNGTPLNMINPGSSEKYLGLQIDPWVGIVKPEIAEKLKNWLEKIDRAPLKPMQKLDMLKTYTIPRIIYLVDHTEVKTAFLEALDAQVRLAVKEWLHLPSSTCDAILYSSIKDGGLGIIRLADLIPSVQARRLHRLAQSSDEMVKGLLKEGNVEKVYEKLWIRAGGKKDRIPSIWETRPVTEAVEVAGDGVSSEWEVSHPKTHYPKPANWRKDEFNKWTKLVSQGRGIENFEDDKISNYWLAMYRGIPHRKLLTALQFRANVYPTREFLTRGRRGNIKSCRHCQAPNETCAHIVGICPAVQDLRIKRHNYICNRLIEVAKKHNWIAFQEPQLRDDYGELYKPDFILVKDNEALVVDVTVRYEYNNKTLEMAANEKAAKYQHLSPQVQELTNADKISFVGFPLGARGKWFEKNSDLLCTLGLSKTKREKLARSLATRALLTSVDMLHVFASKCRTMVMGN

SEQ ID NO: 32534 - protein, 1073 aa, Ixodes persulcatus
MASNTLVVLFPPTDLSCPYCDQPHTSRDKLQGHLNKVHSVIIEWKCSHCQVKLYRLAKSASSHYSTCKLKVAPSYNAVVADDDAGDVDAPCGQTVPHPDGAAIDRAAEGFSRPSGASVPASPASIVVTQTATSHARWSDEELRVVAKLHLQFLNCRHLDRLIAEVVTTRTEFSIQNQRKTDRYKVIFEEEKELHKQTDEVPVRHGPLSASASASNCAESLALSLKNVLDDFAKEGIVDEDLALSLVSEPVTGRVLETIYKFYDVNKKVAKQPKKASKKTPVGNKSQRRRATFREHQRLYHLGPKVLLDELSMEDGEGRVQLEDLHQVYDPLFTSASKDVFTSFETDARIEAAVELFTADEIMVALKSTALKSAAGPDGITLDQLRKIPPSILAHIFNNWLSFERIPEEMKTAKTVFIPKCQGATAATDFRPITISPMIYRIFSRVLLRRFSEGHSFHPFQSGFGDDRSASSNLILLQGMFRHAKISKSNLFGISLDISKAFDTVSHKAILSALEARGLKSPYLRLVQEMYTGCSTTFSVGGLSDDKLIGVRQGIKQGDPLSPFFFNCIMDPLLTDLNTLKVGFPLQGQELGSIAFADDVLLLSASLEGLKFLLSRTEQYLLGVQLKLNPAKSQYFGWRYEGHWRKDFNYQIPPLHVAGQLVNPVKKDQPIKYLGLKLFVNKPPRVDLGEVDAIIAKICSASLKPFQKLQCIKSVALPKVLYAVSNIIGIRQEAGRLDAHFKMKIKTLLHLPYSFPNSHIWMPPREGGLGVMKFSWVGATVQYKSYARLLRLGHAAVDCVFSFVLGDAFDKLARFLGMPGGITDPRDIERAIKLAKIDDTKNMKNNYTNKDLFAHTQEELGNRWLNPDNHFIPDGDKIKGLRLRTNLFPTRTLSNRHSANPKDRECRRCHKRPETTFHILQECEVLRQPRTERHNFVQKQVARLIREKNKNALVELERTFTSPDGVRLRPDIVVTEGSKVVIADVAITWDSNVSILEEKCRFKENKYRCLVPLFPGKEVILAGLAFGARSMTCRTTRTTLQAWGLSKSDVAWLSSRVLLGSLICLNRFSRLVVS

SEQ ID NO: 32535 - protein, 1073 aa, Ixodes persulcatus
MASNTLVVLFPPTDLSCPYCDQPHTSRDKLQGHLNKVHSVIIEWKCSHCQVKLYRLAKSASSHYSTCKLKVAPSYNAVVADDDAGDVDAPCGQTVPHPDGTAIDRAAEGSSRPSGASVPASPASIVVTQTATSHARWSDEELRVVAKLHLQFLNCRHLDRLIAEVVTTRTEFSIQNQRKTDRYKVIFEEEKELHKQTDEVPVRHGPLSASASASNCAESLALSLKNVLDDFAKEGIVDEDLALSLVSEPVTGRVLETIYKFYDVNKKVAKQPKKASKKTPVGNKSQRRRATFREHQRLYHLGPKVLLDELSMEDGEGRVQLEDLHQVYDPLFTSASKDVFTSFETDARIEAAVELFTADEIMVALKSTALKSAAGPDGITLDQLRKIPPSILAHIFNNWLSFERIPEEMKTAKTVFIPKCQGATAATDFRPITISPMIYRIFSRVLLRRFSEGHSFHPFQSGFGDDRSASSNLILLQGMFRHAKISKSNLFGISLDISKAFDTVSHKAILSALEARGLKSPYLRLVQEMYTGCSTTFSVGGLSDDKLIGVRQGIKQGDPLSPFFFNCIMDPLLTDLNTLKVGFPLQGQELGSIAFADDVLLLSASLEGLKFLLSRTEQYLLGVQLKLNPAKSQYFGWRYEGHWRKDFNYQIPPLHVAGQLVNPVKKDQPIKYLGLKLFVNKPPRVDLGEVDAIIAKICSASLKPFQKLQCIKSVALPKVLYAVSNIIGIRQEAGRLDAHFKMKIKTLLHLPYSFPNSHIWMPPREGGLGVMKFSWVGATVQYKSYARLLRLGHAAVDCVFSFVLGDAFDKLARFLGMPGGITDPRDIERAIKLAKIDDTKNMKNNYTNKDLFAHTQEELGNRWLNPDNHFIPDGDKIKGLRLRTNLFPTRTLSNRHSANPKDRECRRCHKRPETTFHILQECEVLRQPRTERHNFVQKQVARLIREKNKNALVELERTFTSPDGVRLRPDIVVTEGSKVVIADVAITWDSNVSILEEKCRFKENKYRCLVPLFPGKEVILAGLAFGARSMTCRTTRTTLQAWGLSKSDVAWLSSRVLLGSLICLNRFSRLVVS

SEQ ID NO: 32536 - protein, 1184 aa, Ancistrocerus nigricornis
MVRTRNQASDADDPGPGSSTAEHSAMDRGTEGDDTGASMDTDLDIIVNVPLPENITNCEVCLRQRIHLGFLNLSDLVKHLKEQHLNTNVTFRCACNRNFPGVRNWYSHYARCKGPIASPVKDFQCNECEKSFYTRTGLSQHERFRHPVIRNDKRRNCIEAEKGVPGRHAYVWTDEETRELRRLDIIHRNSRYPNKEIQVHFPNKTLKQISDKRRQLNERENQRNAHQDEQMEREEGLEDETGSMINELDTQEAEMLVQEEFVSAVEDDYISKVNGYIESIIVPENNKYYDMYKTLCEIWARIKREDNKDSVHAQLNEYISNINKLLTNNTTTNNNNDNKKINSNKNNNNNNRDKNRGNNKNNNKNVHKNKNNVKNNKRDNNNRPGSGTTHNERKKFGFARCQELFKKCPKKLAEYALEGDFSFMTRRTNTPPAKSIEDLYKTLWGIEGPTTRMDELYSATERPWKMDEVCSPVTIEEVRSRIKKIKRNSAPGIDKIKKGHINQTGLIEIFTILFNILILESYFPEIWKDNRTTLIPKPDKDLNVAENWRPITVGSLIGRTFSAIIDQKLRAFITQSDRQKGFTNENGCRINTHILKEVIEEMKRKEGGIIISLDIAKAFDTVPHSVLEPSLKRKRVPESLIKLVKHMYDGCRTTIKCDNENYVKIELKRGVKQGDPLSPLLFNLIIEPIIELVNNNTEGIKMNNNNCAILGFADDIILISKDKIEAQKQINIVNKHISNLGMQISTPKCSAFQIVSRLKTWYTKNPSIKIKNHIIPNIEPDEAMRYLGAKIKPWNNKYKKGDIQQITNVVKNVKKLYLKPLQKIELIQTFILPHFIYSLSIGTPSKTILRTLDDEIRNIIKEILHLPLSIARGFFYTPKRDGGLGLMKFEYAIPMMALRSGLQMKESTDPIVADLANSLAMDKQMEDWSKSLGVRKPDTMDEHTQTKRELKNRSRESWEMLKMQGQGVKYYRGDKVGNSWLTNPVLTKGSRVIDAIRLRTNTFGTRVVLARTNPNISVLCRRCKIKKETLGHILGMCIHTKPSRIMRHNDIRDFVTSKVKNATIFSEPTINEFGELKKPDIVIKKENTIYLADITVRYEDRNYLEEARKEKIDKYKHTAELIKIKLGCTSSEVLPIVVGCRGVMPRETQEALKKLGCNKSDMVTISMIAFRSSIEMANTFIDYD

SEQ ID NO: 32537 - protein, 1184 aa, Ancistrocerus nigricornis
MVRTRNQASDADDPGPGSSTAEHSAMDRGTEGDDTGASMDTDLDIIVNVPLPENITNCEVCLRQRIHLGFLNLSDLVKHLKEQHLNTNVTFRCACNRNFPGVRNWYSHYARCKGPIASPVKDFQCNECEKSFYTRTGLSQHERFRHPVIRNDKRRNCIEAEKGVPGRHAYVWTDEETRELRRLDIIHRNSRYPNKEIQVHFPNKTLKQISDKRRQLNERENQRNAHQDEQMEREEGLEDETGSMINELDTQEAEMLVQEEFVSAVEDDYISKVNGYIESIIVPENNKYYDMYKTLCEIWARIKREDNKDSVHAQLNEYISNINKLLTNNTTTNNNNDNKKINSNKNNNNNNRDKNRGNNKNNNKNVHKNKNNVKNNKRDNNNRPGSGTTHNERKKFGFARCQELFKKCPKKLAEYALEGDFSFMTRRTNTPPAKSIEDLYKTLWGIEGPTTRMDELYSATERPWKMDEVCSPVTIEEVRSRIKKIKRNSAPGIDKIKKGHINQTGLIEIFTILFNILILESYFPEIWKDNRTTLIPKPDKDLNVAENWRPITVGSLIGRTFSAIIDQKLRAFITQSDRQKGFTNENGCRINTHILKEVIEEMKRKEGGIIISLDIAKAFDTVPHSVLEPSLKRKRVPESLIKLVKHMYDGCRTTIKCDNENYVKIELKRGVKQGDPLSPLLFNLIIEPIIELVNNNTEGIKMNNNNCAILGFADDIILISKDKIEAQKQINIVNKHISNLGMQISTPKCSAFQIVSRLKTWYTKNPSIKIKNHIIPNIEPDEAMRYLGAKIKPWNNKYKKGDILQITNVVKNVKKLYLKPLQKIELIQTFILPHFIYSLSIGTPSKTILRTLDDEIRNIIKEILHLPLSIARGFFYTPKRDGGLGLMKFEYAIPMMALRSGLQMKESTDPIVADLANSLAMDKQMEDWSKSLGVRKPDTMDEHTQTKRELKNRSRESWEMLKMQGQGVKYYRGDKVGNSWLTNPVLTKGSRVIDAIRLRTNTFGTRVVLARTNPNISVLCRRCKIKKETLGHILGMCIHTKPSRIMRHNDIRDFVTSKVKNATIFSEPTINEFGELKKPDIVIKKENTIYLADITVRYEDRNYLEEARKEKIDKYKHTAELIKIKLGCTSSEVLPIVVGCRGVMPRETQEALKKLGCNKSDMVTISMIAFRSSIEMANTFIDYD

SEQ ID NO: 32538 - protein, 1058 aa, Ancistrocerus nigricornis
MQCGVPSPRGCQPLRLFFVGTTSNKKPWMNSKMLPAGASHRQIFSEPSQPPSSSLPLLPYPCSYCDKSFTTSRGLGVHMRSKHPVEKDVEQVRIDVKARWSVEERGILARKEAELHVQQKPKFMNQALVNFFPHRSIEAIKKARQNDEHKELVARYTHELEHCSPVREVHTTGNSVAPNVTEPSDFLSYLCSLDPVQGSSHRVDLLEAIIRDAPTCSKPEIMAKLASYLIEVFPPPGPANSVGPGRPGRPGHPGRLGRPPRSDHPRRPGTCNKKKMRRCEYATTQINWIKHQGRCIRSILDPITADIPPREVMEPYWRNVLEEPNDACPARFAPSQCLSNIWTPITTDEIEDNRLTLSTSPGPDGISSRLLRAMPATILTRVINLILFCEMLPPSLRAAKTIFIPKLSGAANPGDFRPITIPSVLVRQIHTILAKRLIAALDLDPRQRAFMSCDGCAENLTLMDLLLRYHHRNHASCYMAVLDVSKAFDRVTHNTILGTLEAYGAPPSFLTYIKNLYDQGSTLLVGEGWSSEPIHAKCGVKQGDPLSPILFNMVIDQLLKTLPNEIGTYIGENAVNALAFADDMVLVAKTPLGLQQLIDKSSDFLKSCGMKLNTAKCKTLSIKGQAKQKNTVIIPQTFMINNVSIPALDRSSEWKYLGINFTANGKCKINPATAMAPKLERLTRAPLKPQQRLHALRTVLIPQMYYMVTLGSVMIGSLNKFDRLIRSAVRKWANLPHDTPTAFFHAPADSGGLAIPSLRWQAPLLRRKRLTNIKLPNLNGNAVANTFLATEIDMATRRLLKCGNSLDSQHKINKDWASRLYNSVDGAGLREADGSKQSHRWILEPSRLLSGRDFINCLRTRINALPTRSRTSRGRPEMDRFCRAGCEVPETTNHVVQQCRRSHGMRIKRHNAVVMYLHRSLEQKGYTTYLEECHQLQNGTTLKPDIVAIKGDKALIIDAQIVTDGRPLQDAHERKCKKYNIDELKQKIRDAKRTKSIGVLSATINWRGIWSKCSAEQLIATGVIRKYETAIISTRVLIGTYSCFKCFNEVTMVRQGIG

SEQ ID NO: 32539 - protein, 1058 aa, Ancistrocerus nigricornis
MQCGVPSPRGCQPLRLFFVGTTSNKKPWMNSKMLPAGASHRQIFSEPSQPPSSSLPILPYPCSYCDKSFTTSRGLGVHMRSKHPVEKDVEQVRIDVKARWSVEERGILARKEAELHVQQKPKFMNQALVNFFPHRSIEAIKKARQNDEHKELVARYTHELEHCSPVREVHTTGNSVAPNVTEPSDFLSYLCSLDPVQGSSHRVDLLEAIIRDAPTCSKPEIMAKLASYLIEVFPPPGPANSVGPGRPGRPGHPGRLGRPPRSDHPRRPGTCNKKKMRRCEYATTQINWIKHQGRCIRSILDPITADIPPREVMEPYWRNVLEEPNDACPARFAPSQCLSNIWTPITTDEIEDNRLTLSTSPGPDGISSRLLRAMPATILTRVINLILFCEMLPPSLRAAKTIFIPKLSGAANPGDFRPITIPSVLVRQIHTILAKRLIAALDLDPRQRAFMSCDGCAENLTLMDLLLRYHHRNHASCYMAVLDVSKAFDRVTHNTILGTLEAYGAPPSFLTYIKNLYDQGSTLLVGEGWSSEPIHAKCGVKQGDPLSPILFNMVIDQLLKTLPNEIGTYIGENAVNALAFADDMVLVAKTPLGLQQLIDKSSDFLKSCGMKLNTAKCKTLSIKGQAKQKNTVIIPQTFMINNVSIPALDRSSEWKYLGINFTANGKCKINPATAMAPKLERLTRAPLKPQQRLHALRTVLIPQMYYMVTLGSVMIGSLNKFDRLIRSAVRKWANLPHDTPTAFFHAPADSGGLAIPSLRWQAPLLRRKRLTNIKLPNLNGNAVANTFLATEIDMATRRLLKCGNSLDSQHKINKDWASRLYNSVDGAGLREADGSKQSHRWILEPSRLLSGRDFINCLRTRINALPTRSRTSRGRPEMDRFCRAGCEVPETTNHVVQQCRRSHGMRIKRHNAVVMYLHRSLDQKGYTTYLEECHQLQNGTTLKPDIVAIKGDKALIIDAQIVTDGRPLQDAHERKCKKYNIDELKQKIRDAKRTKSIGVLSATINWRGIWSKCSAEQLIATGVIRKYETAIISTRVLIGTYSCFKCFNEVTMVRQGIG

SEQ ID NO: 32540 - protein, 953 aa, Ancistrocerus nigricornis
MTLLRKEAELHVQQKPKFMNQALVNFFPHRSIEAIKKARQNDEHKELVARYTHELEHCSPVREVHTTGNSVAPNVTEPSDFLSYLCSLDPVQGSSHRVDLLEAIIRDAPTCSKPEIMAKLASYLIEVFPPPGPANSVGPGRPGRPGHPGRLGRPPRSDHPRRPGTCNKKKMRRCEYATTQINWIKHQGRCIRSILDPITADIPPREVMEPYWRNVLEEPNDACPARFAPSQCLSNIWTPITTDEIEDNRLTLSTSPGPDGISSRLLRAMPATILTRVINLILFCEMLPPSLRAAKTIFIPKLSGAANPGDFRPITIPSVLVRQIHTILAKRLIAALDLDPRQRAFMSCDGCAENLTLMDLLLRYHHRNHASCYMAVLDVSKAFDRVTHNTILGTLEAYGAPPSFLTYIKNLYDQGSTLLVGEGWSSEPIHAKCGVKQGDPLSPILFNMVIDQLLKTLPNEIGTYIGENAVNALAFADDMVLVAKTPLGLQQLIDKSSDFLKSCGMKLNTAKCKTLSIKGQAKQKNTVIIPQTFMINNVSIPALDRSSEWKYLGINFTANGKCKINPATAMAPKLERLTRAPLKPQQRLHALRTVLIPQMYYMVTLGSVMIGSLNKFDRLIRSAVRKWANLPHDTPTAFFHAPADSGGLAIPSLRWQAPLLRRKRLTNIKLPNLNGNAVANTFLATEIDMATRRLLKCGNSLDSQHKINKDWASRLYNSVDGAGLREADGSKQSHRWILEPSRLLSGRDFINCLRTRINALPTRSRTSRGRPEMDRFCRAGCEVPETTNHVVQQCRRSHGMRIKRHNAVVMYLHRSLEQKGYTTYLEECHQLQNGTTLKPDIVAIKGDKALIIDAQIVTDGRPLQDAHERKCKKYNIDELKQKIRDAKRTKSIGVLSATINWRGIWSKCSAEQLIATGVIRKYETAIISTRVLIGTYSCFKCFNEVTMVRQGIG

SEQ ID NO: 32541 - protein, 957 aa, Conopomorpha cramerella
MSQNVTANIPVNSSQSQNMVQCPDCTQPRFFKGKRGLNIHCSRQHKVPSAAAVTSDSAGTSAVSPENLWQVLGGYKRSLPVVKRIPRGARTSVARALSSSVKEVVDKNDCLSWRSLLTFAYRVLHVHKGGKTSLTQKIKDNCHNSEPLNNTGVPPNRGPFDLNKKIESKFDDGDISGAARLLFSSEGIAPDSSDTFVSLQQKHPPRPADEQLPAAPDSADPTPEVVTDDVLKATISFKSGSASGLDGLSPQHYKDLLCGVTGDVGRTLLTDITSLVNIMLAGGVCSEVLDVLYGANLIALVKKDGGIRPIAVGNTLRRITSKICCRRLLPHLSARFQPVQLGFGSYGGCEAAVHAARTYLRRGDGEVFLKIDVKNAFNSVTRGSILSQVKQHAPQIYRYIWQCYSESSSLVYGARRIPSATGCQQGDPLGPAIFALAIHPVIEAVKSKFNIWYLDDGTIAGDATTVYNDLECLISSFRSIGLELNFSKCELFLNPHMSVPDSQHIIHAFNHLTPGIQVVDSSSLYLLGAPLFDDAIPTYVDAQILKLESVYGRLKQIHPHMAFMILRFCVFVPRLTYVLRCTNMWQHAMQLNNLDNVLRKVLSGILNCAFTDDSWIQATLPVRFGGLGIRSIASVALSAFLSSVHSTRDLFGIICSPSLGDVEIAGFADAVQTWQCATGSSVLPTITCAQRQWDEPLCRKVSDTLINNASNPVEKARILASLETESGYWLNALPSLRVGTLLDRTTFALAISLRLGVRTNEPHLCRCGGNVDFLGHHGLSCQRSAGRMSRHAAINDIIRRALVTCGVPSVLEPSGICRTDGKRPDGMSLIPWTNGLPLVWDATCVDTVAPCHVSASAAKAGSASTAAEINKKRKYATLPQGYIFVPFGVETMGSWGPEARGLYKQLCARLVEVSGDPRAGSYLGQRISLAIKRGNAASVCGTLPSDGGDLRDIFYLT

SEQ ID NO: 32542 - protein, 922 aa, Limonius californicus
MNKPSTGRKKIKTYHYHSEWEEDYFFTMMKDKCVCFICNATVALPKKANVERHFLIVHKHYEEDYPRGTALRKAKMQQERQLIDLILSDNPLVADRIDGFLLELSEIRARPIPQGPRPGRNNNRAGKKYRGSAAGRAYEFKLNQQIFYKNKKLLSRKIMDNAPEDGDPDVPDIDDVEEVFRGRFSGEPRRDEALYLCDSLVEEQGIDTFAPITVEELSWAIKSTRSTAAGPDGLNISFIKRVPMARLVLLFNAIFYTGHTPQPLKECRTILIPKGGDPKDINNWRPITIASIWVRLLNRIIAARMGKIPLCELQSGFQKIDGCMANAVILQSVLKIARSKVQPHTILDLAKAFDCVEHSSFLRALNRCKVHPRTVKYIINSYSSCHTKISCGNSVTGQIPLNKGVKQGDPLSPVIFNIVMDELLQHLRQLDAGLPINEDGDYVPALAYADDLVLFGKSNGEANMLLRICNDFLEGRGLKINAEKCTSLSALVVPKKKRLCIGTSPRFYVEGRPINPIGPTEQFKYLGFRYGALGVCNSDFVNFRTAVGRIAKAALKPLQKMVLLKEFAIPRVMYSLQTLGIYKKTLSNFDKVIRRSVKQFLRLPNSTPNGLLYANVRDGGLGISCLVDSIPAITIKRAENILLARNTVASRALQSLWCVRQLQRLGSFTNHGPTNGQIRSFWQGSLDSSTSGNGLHQGKTSTISCHWVSNPPSFWNNRDQIKAVQLRGNILPTVGTPYNRGAAAKCRAVCARNETVCHVLQACPLTHWQRIRRHDHGINLLAKALENKGWRVHREPNIWCTDGSRRKPDLIVEKEEQVLIADFQIVWEGPRPLLAAYRNKEAIYSGASFIEGVKRKWPDRILSTLPVIIGARGTWCDANSGLWERAHLPRSLAETLVRDVIRGGAMIHGDFMRMVWRARDRV

SEQ ID NO: 32543 - protein, 947 aa, Tenebrio molitor
MHAKVQREEMLTTPEKPVTENQKLTPNRMQLPSANTNATPPEPYANAVNILPVRSLRARPRRSRSLPPTPRPAAVSDGNGRVGPQGLALFLLSPEPAVADALGRSESLAEMASAALNADDIELSRIVDKWLQKLAESTQYRRKGRRPKRNRGYHYAQTNTGSGQRASFYKKCQDLFQKNRRGLAEMILTGREETDVKAVPSVSSVEALYGGIFESPSPPDDEPYEQKRTGVSEFAYITLDEIRAAKSGWSVSAPGVDRVSVATVKNMSEAALAVLFNAVVFRNVQPASWKLLRTTLVPKEGDLRDPGNWRPITIGSAVQRLLHRVLAARLSKYASLSSSQRGFTEIDGTLANAMILHEYLQGRVLGGKAYSIVSLDVRKAFDTVSHCSISRALGRFGVPNALHKYIMATFDASTAIKIGAAVSRPIGIRRGVRQGDPLSPILFNICMDELLERINEKYQGGSLHNGERNTIMAFADDLIITADRDIEVPLILEDVSAFLERRGMAINPSKCRALVAGVVRGRSVPRTRPNYSIYGKPIPNVDAFNAFRYLGHEFGHKGVERPSILNLTNWLANIKKAPLKPDQKLTILKLYVIPRLLYGLQNPKVTSRTLRDGDRLIRKAIKGFYHLNAHTPDALIHASVRDGGLGVMELRRAIPRIFLGRLVNLMEKDGDLVLSSVLQSDRNRSLMIRLSGIAGDVPETTHWRDKIASGALSKGLEQTSEDSSSRLWISDRPTGWSGRDHVRAVQLRTANLPTKAIPSVPVGQRRCRHGCAVDESIAHVLQTCPLTHGSRIRRHNEVVAKIARHCKTRGWAVEDEPHIRSPCGQLFKPDLAVHLPGGTTVIADVQVAWDSESLRIPYERKRAKYDVPPFHKAAKRSWPGKKLVFAPIILGARGIWPRLNSDRSSILEIPPAVRRSCVNSVLKWGSSIHAEFSRSVWAKRLNPRPAP

SEQ ID NO: 32544 - protein, 1275 aa, Tribolium castaneum
MSRRPGKSNEPPVRSRAMGLTTLSGTKTSNSGAQGPSTSAPMQNMAGGFVCDCGRSYALKTSLARHKKECGKNNTECRWCGTRFNTLAGTRQHERKAHFVQYQSDLAKALPQPESELMEKIAIVEARSSNGIFYKEMMASTGLTHQQVRSRREKPEYKGFLERARRSLAQTNIRAGSISPASTIAGSLESASPKAGCSSSASPGPTTRSRAPTKGVPLRSSNSARIVVEAQVHTRAPPNTGETEVALRESRRTVPRLGPNPSRPCGISPLMAIAIDEDSVLGGLRVQAEPSPTAVHSVETFPGTSSMTPMETDRVHNKSGIDPILEHNGTRQVRREESSTREDPVEQWSPNYPKTPVTMPNITTTADASCTSYNRTPQTLPGNRRRRSRSLPPVQRKSASDDLESVDSLGPWAVFLQDQVDAGSLSGNDSLADLVRVALTKSDRGVLNDAVNRYLAQRAESLRIRKRGSKGKRKSKTGRHYGQTTSGSGQRAALFKKHQDLFLKNRRGLAETILSGKEDFGPRPEPPVTSVEEFYGGIFESPSPPDNEPLEVRATGVEDPPTYITMDEIKAARAGWQISAPGSDQIPVAAVKTMSELELAILFNIILFRNVQPSAWGVLRTTLVPKDGDLRNPANWRPITISSAMQRLLHRVLAARLSKLVSLSSSQRGFTEIDGTLANALILHEYLQYRRQTGRTYQVVSLDVRKAFDTVSHCSVSRALGRFGIPSVIREYILATFGAQTTIKCGTVTTRPIRMLRGVRQGDPLSPVLFNLVMDELLEKVNEKYEGGSLQSGERCAIMAFADDLILIADRDQDVPAMLDDVSTFLERRGMSVNPAKCRALIAGAVSGRSVVRTGSSYKIHNTPIPNVDALDAFKYLGLEFGHKGVERPTIHNLSVWLNNLRRAPLKPDQKCLFIRQYVIPRLLYGMQNPQVTSKVLREADRLIRRHLKTYYHLNVHTPDSLIHASVRDGGLGIMELRKAIPRIFLGRLVKLLNKNNDSVLSSVLQSDRVRTLMGKLSTMAGEVPESTFWRNRIASGPLSKGLEQAAEDSASRLWISEKPSGWSGRDHVRAVQLRTGNLPTKAIPSVPVGQRRCRHGCACDESISHVLQMCPLTHADRIRRHDEVVKKVARHCTSRGWTVEVEPHIRSRCGRLFKPDLAVHQPGGAIVIADVQISWDSESLTVPYERKRAKYDVPQFHQAAQHAWPGKALTFAPVIVGARGIWPRINNDRSAALQIPPVVRRACVNSVVKWGSSIHATFMRSVWANRLNPRPLRA

SEQ ID NO: 32545 - protein, 944 aa, Amyelois transitella
MTENLSLSTCPLCPGSSRQFVVPRGLSVHMSRMHGQHQHRSDVIGSSAPSANSADVQKPLETLASLKKHIPVLKHIPKGARCLAAGKLIPLIRECLRDNSEEAWFALLSFSFTAFRVPSRECHSSLTSKVKENIDRVGHRDSISFGVFKKTSTSIYRSIESKVFDGDLRGAVRLLLSDCSVAPNDVGTHNALISKHPTPSRVLSLPPEPNRTNSFLSVTSEEVLAALNSFQTGSVSGLDGIRPDHLKELVSPSAGDNGTRLLEAMTELCNFLLRGLLNPLVCPYLYGGSLCALKKKDGGIRPIAVGNTFRRLVSKLACRSVRQSAAHHLQPHQLGFATAGGCEAAIHATRYFVEVNKNTDSVIVKVDLVNAFNSVERDFMLKEVLEHTPVIYPFLYQCYSSSSHLFFQGRPISSQVGAQQGDPLGPLIFSLAIHRAVTSMKSPLNVWYLDDGTLGGPPDVVAADLQNLSVMFKQLGLEISTSKCELFLCGQVASTSISRFEYLLPGVKVVDESNFRLLGAPIFKEGLPQSFKDKLINLVASHDRLKNLSSHVSLVLLRNSLAVPRLTYVLRTSPSWLCPHEIEQFDNAVKSILEDILNVRLDEVQWKQASLPVRCGGLGIRRLEDLALPAFLASSHGVVNLVTKLLPSSGDSLILPFVDDALIAWVGQNPNCAVPDRPEVQRLWDENRTQAIFKELEGQVTGAHLARFKAAAEPESGAWLHAIPSPQMGTLLDNESLRVAVALRLGCVVCQPHLCVCGKMVEADGHHALGCVRCAGRLSRHHSLNDIIRRALISANIPCQLEPPGLSRTDGKRPDGLTLVPWQRGRCLLWDATCVSTYAASYLTNTERTPGAAAKMAAEQKINKYSVLTTQYEFVPVAVETAGPWCPQARLFIGEIGRRLKARGYDYRSGWYLVQRLSIAIQRGNAASLMGTFEPGAVRGGIFD

SEQ ID NO: 32546 - protein, 942 aa, Ephestia elutella
MSDNLNHATCPLCPGTSRQFVVPRGLAVHMSRMHRQNRPDSSRDHSAPSSQTSSDNVCNLLDTLSTLKKQVLVLKHIPKGARHLAAGKLATLIEDCLRENNTNAWYTLLSFSYTALRVPNREGHSSLTSKVKENINSAGHVNGSYNKRNAYSLNKRIESKLHDGDFRGAVRLLVSECSIAPTNDDTRDALIQKHPAPSRPLCLPAEPNLANVFLTVISAEVTIALNSFQTGSASGLDGLRPDHLKELISPSAGENGNRLLKSLTDLCNFLLKGLVNPQVCPYLYGGSLCALKKKEGGIRPIAVGNTFRRLVSKLACTSVSRNIAAYLQPQQLGFGTSRGCEAAIHATRYFATINNNSNNVILKLDLVNAFNSVERDAILNEVLEHTPALYPFIYQCYASSSFLFYKESPILSQVGAQQGDPLGPLIFSLAIHKTLVSLDSPLNVWYLDDGTLGGPPDIVASDVRKLCDEFERLGLHMGASKCEVFFCSDEARDSLPEFECLIPGVRVIQRDNFVLLGAPIFEEAISNSIKEKVMAFTATHERLKCLSSHVALVLLRSCLAVPRMTYIVRTSPTWSCPLEVEQFDNELRLILAAILNVKLSESQWIQASLPVRHGGLGIRRMSEVSLPAFLASSHGVVNTVAKILNINGDVLILPHVNDALLAWSAKYPNLPYPDRPEVQRLWDEIGAKNTFKELVNQSDGAHLARIKASAQPESGAWLHAVPSPHMGTLLDNDSLRVAVALRLGCVVCEPHRCVCGKAVEADGHHALGCLRCAGRLSRHHSLNDIIRRALISANVPCQLEPPGLSRTDGKRPDGITLIPWRRGRCLLWDATCVSTYAASYLSNTAQSPKAAARVAAGQKVLKYSVLSTNYEFVPFAVEVAGPWCPEARAFIAEIGRRLRERGFDQRSEWYLVQRISLAIQRGNAASVMGTFEPGTIRGGIFD

SEQ ID NO: 32547 - protein, 943 aa, Ephestia elutella
MSDNLNHATCPLCPGTSRQFVVPRGLAVHMSRMHRQNRPDSSRDHSAPSSQTLSDNVCNLLDTLSTLKKQVLVLKHIPKGARHLAAGKLATLIEDCLRENSTDAWYTLLSFSYTALRVPNREGHSSLTSKVKENINSAGHVNSSYNKRNAYSLNKRIESKVHDGDFRGAVRLLVSECSIAPTNDDTRDALIQKHPAPSRPLCLPAEPNLANVFLTVTSAEVAIALNSFQTGSASGLDGLRPDHLKELISPSAGENGNRLLKSLTDLCNFLLKGLVNPQVCPYLYGGSLCALKKKEGGIRPIAVGNTFRRLVSKLACTSVSRNIAAYLQPQQLGFGTSRGCEAAIHATRYFATINNNSNNVILKLDLVNAFNSVERDAILNEVLEHTPTLYPFIYQCYASSSFLFYNESPILSQVGAQQGDPLGPLIFSLAIHKTLVSLDSPLNVWYLDDGTLGGPPDIVASDVRKLCDEFERLGLHVGASKCEVFFCSEEARDSLPEFECLIPGVRVIQKDNFVLLGAPIFEEAISNSIKEKVIAFTATHERLKCLSSHVALVLLRSCLAVPRMTYIVRTSPTWSCPLEVEQFDNELRLILEAILNVKLSESQWIQASLPIRHGGLGIRRMSEVSLPAFLASSHGVVNTVAKILNINGDVLILPHVNDALLAWSAKYPNLPYPDRPEVQRLWDEIGAKNTFKELVNQSDGAHLARIKASAQPESGAWLHAVPSPHMGTLLDNDSLRVAVALRLGCVVCEPHRCVCGKAVEADGHHALGCSKCAGRLSRHHSLNDIIRRALISANVPCQLEPPGLSRTDGKRPDGITLIPWRRGRCLLWDATCVSTYAASYLSNTAQSPGAAARVAAGQKVLKYSVLSTNYEFVPFAVEVAGPWCPEARAFIAEIGRRLRERGFDQQRSEWYLVQRISLAIQRGNAASVMGTFEPGTIRGGIFD

SEQ ID NO: 32548 - protein, 1047 aa, Dermatophagoides pteronyssinus
MVSRRLNNRIPPRGWAKIKSAYDIQFNSQVSIIDLKNEYNREKNKQQNRRTNDNESEIQDQTIMERIHDTKKFIKIKQLLLNNIDKFVNNKEVKRFTRKIYSQREQNEIFKMINIIIEKEKILDKMATLEQMNDLYYACQMTYEEMTKVNKVQNNWETNIKNKVQKLEDKMKAIDNFLTTKEVSAKVKRILQNRGCHSNNTGRVKIIRDEISEKIASHKRRLDVNNNRIKFHIDNERFEFNRKRFYRGIDEQQRKVSENVNQTEVLEFWQQMWSKSDQDENEFDDIVGTLDPVQLQVEVDDDRQREIIMATIKYLANWKTPGHDMVYNFFIKKIDSTHQKLSDLIIDAIKNPEKIHQTFYEGTTYLIPKKKESAKPEEFRPITCLPNMYKLISKIVTKIITDILDTNQVISPNQLGTKRGTQGAKEQALINKTINSSNNYQLFTSWIDVKKAYDSVSHVYLIECLQQLNLPTNLVNFVQRMLCNQRTKLIVNGNSIGSAAIDKGILQGDSLSPKLFVLALEPLSRILNRKCEKISVRDTELKRNHILFIDDIKLFAKNRDALNEICKETREWLNQIGLKTNEEKSASNTIDEFTFGQIPDEMKGYKYLGVWEDKNSFIKSENKIMIRNKIMDRVIKLADTKLSARNLFKAINEFAISTINYYIGIIEFEPEEIKNIDSDIRKILVDKKISRKAANVDRLYLPRKQLGRGLFNIEERSETMLVSLHEYLSTRSDLTPVLDSEKENVTHLATINQYIQQKYCLEPNAQISTVDLIKLQSEKRINKIKEKTLHGVLFENEEEVIDIAGSTIWLTKGMISPQEEGMLTKVQDRNLFFANQQCNHCGKAKKSVDHLATKCGRILDTDYKRRHNEIVRCLHFMFTKRYGLSRRNKLKNYKVENVLSNERVLIKSDLPIQTQLRIENNKPDLMVFDKKKKEIILVEVGVTNKDRLKTTETTKARKYEILANELAIMYGAKVVQIPVVLTWDGLVTRYFKKYMEMLQVDQRTQAYIQYKTIKKTAESILIDLRGGLEEVVHDDEMEKLLELLERE

SEQ ID NO: 32549 - protein, 735 aa, Nomada fabriciana
MEALQGQEFHVKHLDQICQHIGRWPIQRTLEEIGLYLRKVFPSPQETRRHSGGSRQVRKALTKRQERRAEYGRTQRAWRRNPCGCLRQILKGKEITPTPAEDTMVPYWRAVMSNNSTQTPGIGVAGIVKDELWNPINQREVIKAFPERTTAPGPDGITANQIRAVPLGIMARIFNIFLVCRKVPEWLLESTTTLIPKKTEANGPGDYRPITVSSVIIRTFHKILANRLAKFIHLDPRQRAFVAADGCAENTFKLDMLFRHHRQNFKPLYLASLDIRKAFDSVTHTTIVDTMVNMGLPQAMVSYIKYIYDGSFTRLKCSSWVSEEKIHLTCGVKQGDPLSPIMFNMIMDRMIRLIPNEVGVDVEGEHYNRLAFADDIILVAATPQGLQMTLNVATEFLAQCGLRINTQKSFTVALRNVPHLKKSVVDKAVKFVCLGEMLPAMRREEEWKYLGIPFTPEGRSLHKPEEQLAEALAKLSKASLKPQQRLFAIRVMVLPGIYHSLVLGNTNLSRLKKIDTMVRGAVRKWLALPHDVINAYFHANVKAGGLSIPAMRWLMPLRRKERLEGLLKRGLEPGPFIKQEIDKARRRLKVGTEELDHRKKIDARWARMLHESYDGMALRESAKVPQQHQWLTEGSRFLSGKDFVNSAKLRINALPTKSGSNRGRRADRMCRAGCNEVETLNHVIQRCHRTHVARIARHSAIVKYIKRALKKRNERVDDEPHFKTASGLRKPDLVA

SEQ ID NO: 32550 - protein, 1017 aa, Andrena haemorrhoa
MTTTVGGPTGLSGPTLTPSDDSNEDTEPEPAVLFPCRMQGCGRAFQTSRGRGVHEQKVHKNWYDEQQALSITNRKAPWSDEEAALLARHEAHLTIMGERFLNQALAPYFPNRTLEGIKGQRKYARHKQKVLDLIRELREAPGSPQDRGIADEHQSEAVDSLRDKIRDGIEALEPLSGTEFIAEQLDLICKHIKQWSDERIFEELEIYLQGLFSAPPEVRRKNEVFAPDRTPTNRQKRRAEYAQTQRAWQRNPCDCLRTILKDKVSANVPNKETMVSFWRAVMTDTSDVTPGVGVRQPIIEAIWEPIGGDEIKKAFPEVSTAPGPDGITARQLRAIPLEILARIFNILLICGKLPERLLKSRTTLIPKKDNAVEPGDFRPITVSSVITRTFHKILAKRLMRHIALDQRQKAFIPADGCAENTFKFDLLLRYHRQNFKPLYLASIDIAKAFDSVTHQSIIDTLGTMGLPSPMISYVEYVYRNSKTKLSCNGWVSDEIHPTCGVKQGDPLSPILFNMVMDRLLKRVPREIGVDIAGEHYNAFAFADDLVLIASTPQGLQMTLDIVTGFLAECGLAINTGKSFTVAIRNVPHMKKSVVDSNIRFRCDGRDLPSMKREDEWKYLGVPFTPEGRTLVSPEGQLREALTKLTKAPLKPQQRLFALRVMVLPGLYHVLTLGGTNLSRLKKVDTLIRGAVRKWLALPHDTVNAYFHANAKDGGLSIPSMRWLMPLRRRERLEGLVRRGEEPGPFISQEISVSRRRLKEGQTDLNCKAKIDKRWADLLHASSDGKALMLSREVPQQHQWVTEGNRFLSGKDFINSLKLRINALPTNSRSKRGRIASRGCRAGCNEIETLNHIMQRCHRTHAARVARHDAVVSYLARALEKKYERVDVEPHFQTPEGLRKPDLVAKLGQTALVVDAQVVGEQVDLATAHERKINYYQELRNDVEARYEVTSVVFTSATMTCRGLWSHTSVEDLIRMDVIKKKEIKVLSSRVLIGGMNAYRIFSKSTTTIRRRPRTGIG

SEQ ID NO: 32551 - protein, 1017 aa, Andrena haemorrhoa
MTTTVGGPTGLSGPTLTPSDDSNEDTEPEPAVLFPCRMQGCGRAFQTSRGRGVHEQKVHKNWYDEQQALSITNRKAPWSDEEAALLARHEAHLTIMGERFLNQALAPYFPNRTLEGIKGQRKYARHKQKVLDLIRELREAPGSPQDRGIADEHQSEAVDSLRDKIRDGIEALEPLSGTEFIAEQLDLICKHIKQWSDERIFEELEIYLQGLFSAPPEVRRKNEVFAPDRTPTNRQKRRAEYAQTQRAWQRNPCDCLRTILKDKVAANVPNKETMVSFWRAVMTDTSDVTPGVGVRQPIIEAIWEPIGGDEIKKAFPEVSTAPGPDGITARQLRAMPLEILARIFNILLICGKLPERLLKSRTTLIPKKDNAVEPGDFRPITVSSVITRTFHKILAKRLMRHIALDQRQKAFIPADGCAENTFKFDLLLRYHRQNFKPLYLASIDIAKAFDSVTHQSIIDTLGTMGLPSPMISYVEYVYRNSKTKLSCNGWVSDEIHPTCGVKQGDPLSPILFNMVMDRLLKRVPREIGVDIAGEHYNAFAFADDLVLIASTPQGLQMTLDIVTGFLAECGLAINTGKSFTVAIRNVPHMKKSVVDSNIRFRCDGRDLPSMKREDEWKYLGVPFTPEGRTLVSPEGQLREALTKLTKAPLKPQQRLFALRVMVLPGLYHVLTLGGTNLSRLKKVDTLIRGAVRKWLALPHDTVNAYFHANAKDGGLSIPSMRWLMPLRRRERLEGLVRRGEEPGPFISQEISVSRRRLKEGQTDLNCKAKIDKRWADLLHASSDGKALMLSREVPQQHQWVTEGNRFLSGKDFINSLKLRINALPTNSRSKRGRIASRGCRAGCNEIETLNHIMQRCHRTHAARVARHDAVVSYLARALEKKYERVDVEPHFQTPEGLRKPDLVAKLGQTALVVDAQVVGEQVDLATAHERKINYYQELRNDVEARYEVTSVVFTSATMTCRGLWSHTSVEDLIRMDVIKKKEIKVLSSRVLIGGMNAYRIFSKSTTTIRRRPRTGIG

SEQ ID NO: 32552 - protein, 1017 aa, Andrena haemorrhoa
MTTTVGGPTGLSGPTLTPSDDSNEDTEPEPAVLFPCRMQGCGRAFQTSRGRGVHEQKVHKNWYDEQQALSITNRKAPWSDEEAALLARHEAHLTIMGERFLNQALAPYFPNRTLEGIKGQRKYARHKQKVLDLIRELREAPGSPQDRGIADEHQSEAVDSLRDKIRDGIEALEPLSGTEFIAEQLDLICKHIKQWSDERIFEELEIYLQGLFSAPPEVRRKNEVFAPDRTPTNRQKRRAEYAQTQRAWQRNPCDCLRTILKDKVAANVPNKETMVSFWRAVMTDTSDVTPGVGVRQPIIEAIWEPIGGDEIKKAFPEVSTAPGPDGITARQLRAMPLEILARIFNILLICGKLPERLLKSRTTLIPKKDNAVEPGDFRPITVSSVITRTFHKILAKRLMRHIALDQRQKAFIPADGCAENTFKFDLLLRYHRQNFKPLYLASIDIAKAFDSVTHQSIIDTLGTMGLPSPMISYVEYVYRNSKTKLSCNGWVSDEIHPTCGVKQGDPLSPILFNMVMDRLLKRVPREIGVDIAGEHYNAFAFADDLVLIASTPQGLQMTLDIVTGFLAECGLAINTGKSFTVAIRNVPHMKKSVVDSNIRFRCDGRDLPSMKREDEWKYLGVPFTPEGRTLVSPEGQLREALTKLTKAPLKPQQRLFALRVMVLPGLYHVLTLGGTNLSRLKKVDTLIRGAVRKGLALPHDTVNAYFHANAKDGGLSIPSMRWLMPLRRRERLEGLVRRGEEPGPFISQEISVSRRRLKEGQTDLNCKAKIDKRWADLLHASSDGKALMLSREVPQQHQWVTEGNRFLSGKDFINSLKLRINALPTNSRSKRGRIASRGCRAGCNEIETLNHIMQRCHRTHAARVARHDAVVSYLARALEKKYERVDVEPHFQTPEGLRKPDLVAKLGQTALVVDAQVVGEQVDLATAHERKINYYQELRNDVEARYEVTSVVFTSATMTCRGLWSHTSVEDLIRMDVIKKKEIKVLSSRVLIGGMNAYRIFSKSTTTIRRRPRTGIG

SEQ ID NO: 32553 - protein, 1127 aa, Coccinella septempunctata
MRRDPAPTRTRQRLRWTRDMNVSLMSAYYHVTEGETQTKKYAEKLAERWIQSYPDKNLTGKHLVAQVKNIKTRKLLAPDELDRMRAEAVGNSPTRNVNSIRSSIRRQSALPQPQNIYGQQNEDQPIADDSTTDPSDPDEATLGILALFKEEEQQWRGVEMEVRPRIPKIKQDGNTKPTMRALNAALQEIFMAAENFEDLCHLVYCTANVANKIAGTKSTVKNQPTLPQRRAPWEDRLEGKIKNLRKEIGILHIYLHGNNVSKKVEKKVQVYARKLRLKQSDANYHMRLRTHSEKLKQKIAALGNRLRRYHKRTQRYRQNNLFNSNQREFFRDLQEDRNNKNATPPKPEEMWKFWSEVWSQQKTHNTEAPWIKVETERCESLQEMDMITVTEEDVRATVNRMKNWASPGVDSIQNYWWKLLPSTHRVVANLIRRALERPDSVPKYFTHGITHLVPKKGDLNQPSNYRPITCLPSAYKILTSSISHKMNIFLRTNNIMAWEQNGCKRGGRGSKELLVIDNMITKQAKRRLKNISMAWIDYQKAFDSVPHSWLIQVLRIYKINKQVIALLEHLMFSWRTTLSVHNEEASYQTPEIQIKRGIFQGDSLSPLWFCLALNILSKMLNRSSYGYSINNQTIISHLFYMDDLKLYARGKKQMEGLLELVRSYSEDIAMTLGLEKCATVNVKRGRMTEEDVVTLSDGREITGLSTEGRYKYLGIQQTFEIQQRENKDNTKKELLKRVNAVLSTQLSAKNKVMAINIWAIPCFTYTAGILSWSATELGQVDRSIRTLFTKHGMLHPNSAVERIYLPRKEGGRGLSNLEEACLKEKEKLDHFFQNSNSPVHRWVAASDRNSVEAEELERVDKLALLRQRWQSKPLHGRFYASLHQPEVDLEGSNTYLTQGYLFPQTEGTFLAVQDQVVPTRTYVRHIMQQQVESTRCRLCNSAEESVQHLSSGCSAIASTSYLTRHDNMGKVVHQLLCLQKQLLHNFTPHHLYSPQPTLENNQWKIYWDLSIETDRSIEHNRPDMVIWDKEAKTALIIDFTVPQDYNLAKAYGEKISKYEALAQQMRDMYQLRKVDIMPLIISANGLVPKKTTEHLKELSLPQNATLWMQKAVILGTVNIIRKVLYPH

SEQ ID NO: 32554 - protein, 925 aa, Propylea japonica
MITNIIHQTKTTTNNRANCSPQKPPWEERINQKINTLRKEIGILHSYLNNEKSSRKVERKIQVYARKMRLKRSDTEYHLKLRTREETLKQKIAALGNRLRRYNKRTERYRQNNLFTGNQREFYRSLEDKETEDSKPPNPDDMMKFWSEVWSKGKDHNTEAPWIKTEKEELGDLEEMAEIRVSEEDVRETIRRMKNWTSPGLDGIHNYWWKTLTSTHTTLAQLIYKALKDPGTIPAYFTHGVTHLVPKKGDLSQPGNYRPITCLPSAYKIITSTIAFKINNHIKANHIMAWEQNGCKRKGRGSKELLMIDNMLTKQAKRRLKNISMAWIDYQKAFDSVPHSWLLEVLRIYKVNRRVIVLLQHLMSTWRTTLKSKVSKSTTYKTTEVKIKRGIFQGDSLSPLWFCLALNILSRMLNRSKYGYVINERIRLTHLFYMDDLKLYARGRAQLEGLLELVRKFSEHIAMTFGLEKCAIVDVRRGKMIEEGNIILSDGREMASLRTEDRYKYLGVQQSYDIKHRENKENVRKELQSRVKKVLKTQLSAKNKILAINIWAIPAFTYTAGILSWSKTELEQVDRSIRTSFTQFGILHPNSAVERLYLPRREGGRGMTNLAGAALKETAKINNYFEKSNLPVHQWVASCGRVSVTSGITDEEIPGREDTLEILRQAWQAKPLHGRFLANMRQAEVDLQSTNTYLTQGYLFPQTEGTLFAIQDQVVPTRSYVKHIMKQNIDNTRCRLCDGAEETVQHISSGCSAIAGTKYLARHNNMGKVVHQVLCLQLQLIQQFIPHHLYTPQALLENQHTKIYWDLTVVTDRGVEHNRPDMVVWNKTAKEAIIIDFAVPQDYNINKSYSEKITKYEALAQQMKEMWKLKGVYIKPFIISANGLVHCKTTQHLKDLKLPQNTLMWMQKAAVLGTVNIVRKVLYPH

SEQ ID NO: 32555 - protein, 1045 aa, Harmonia axyridis
MNVSLISAYFFVTEGETQTKKYAGKLAERWIESYPDKQFTGRHLVAQVKNIKTKKLVAPDEIDRMKADAVRNSPTRNMNNIRRSILRQSTLPQRRISYQQESEDQADTNNVPTNIPEPDEATPGILANNILETKSTNKDQQKQPQQKLPWEDRLERKIKMLRKEIGVLHTYLHNNNSSRKVEKKVQAYAQKVRLKRSDTNYHMKLRTHAETLKQKIAALGNRLRRYHKRRQRYRQNNLFTSNQREFFRDLQKDQASENTTPPKAEEMRKYWSDVWSQEKTHNTEAPWIRTEAEECRSMEGMAAISIAEEDVRATVSRMKNWASPGVDSIHNYWWKSLPSTHNMLARFIRGALEKPDSVPEYFTHGITHLVPKKGDLKQPGNYRPITCLPSAYKILTSTIAFKISSYLKANNIMAWEQNGCKRKGRGSKELLVIDNLITTQAKKRLKNISMAWIDYQKAFDSVPHSWLLEVLKIYKINRQVIALLGHLMSTWRTTLFVHNISASYRTSQVLIKRGIFQGDSLSPLWFCLALNILSKMLNRSSYGYSINSETLITHLFYMDDLKLYAKGKKQLEGLLELVRRYSEDIAMTLGLEKCATVNVKRGKMAVEDSVTLADGREMTGLSREDRYKYLGVQQTYEIKQRENKDNTKNELLKRVNAILSTQLSAKNKVMAINIWAIPCFTYTAGILSWSTTELGQVDRNIRTLVTKHGMLHPNSAVERIYLPRKEGGRGMTNLEEACLKEKEKLDLFFRNSSSPVHRWVAASDIVSTPTSTADAEENRLNRLRQTWQAKPLHGRFYASLHQPEVDIENSNTYLTQGYLFPQTEGTFLAIQDQVVPTRTYVRHIMKQRVESTKCRLCNSAEESVQHLSSGCSAIAGTRYLTRHDSMGKVVHQLLCLQKHLLHKFTPHHLYSSHPIEENERYKIYWDLSIVKDRSVEHNRPDMVVWDKEEKTALVIDFAVPQDYNLAKTYGEKMSKYEALAQQIKDMWQLKKVNIMPLIISVNGLVPKRTTQHLKELNLPHNAIMWMQKAVILGTVNIIRRVLYPH

SEQ ID NO: 32556 - protein, 1113 aa, Harmonia axyridis
MNKCLISAYFHVTEGEKHTKKYAEKLAERWRESYPDKQFTGKHLIAQVKNIKMRKLLAPEEIELMRAESVLNSPVRRIYNIRRSIELRRTLTRTEIDYVQQSNEEQPIQDHQHTTLLESDEATEGILLLFQEYRLKWEGITMKARPKITKLQQITNTKVTMRAINAALEETITTSESFEHLCHLVYCAAMVANTIHQTKSKNNDSTNRTPQRPPWEDRINTKINTLRKEIGILHSYLNNINPSNRVQKKVHSHAKKMKLKQKDPQFHLKLKTRAEILKQKIAALGNRLRRYNKRTQRYRQNNLFTGNQKDFYRSLEEDQGNLDTTPPKPEDMRKFWSNIWSKGKDHNTEATWIKTEMEELRELEEMAPMQVTEEDVRATIGRMKNWTSPGIDGIQNFWWKTLTSTHKVLAQLISKALIHPDTIPEYFTHGITHLVPKKGDLRQPGNYRPITCLPSAYKIITSTVAFKINEHIKANNIMAWEQNGCRRKGRGSKELLMIDNMITKQAKKRLKNISMAWIDYQKAFDSVPHTWLLEVLKIYRVNRRVIALLEHLMRTWRTTLKVHNKSATYETSEVEIKRGIFQGDSLSPLWFCLALNILSKILNRSTYGYSINQQIRISHLFYMDDLKLYARGWAQLEGLLELVRKYSEDIAMTFGLEKCATVNVKRGKMSRGENIILSDGREMTGLRYEDRYKYLGVQQTFEIMHRENKDNTKNELLKRVKKVLRTQLSAKNKIMAINSWAIPTFTYTAGILSWSKSELEQLDRSIRTSLTQHGVLHPNSAVERLYLPRKEGGRGMTKIGRAALKEAEKINDYFRKSNLPVHQWVASCGRVSVSETSNEEVPENENNFETLRQAWKAKSIHGRFYASLHQSEVDMHSTNTYLSQGYLFPQTEGTLFAIQDQVVPTRTYAKHIMKQAVDNTKCRLCNGAEQTVQHLSSGCSAIVGTKYLARHNNMGKVVHQMLCLQKQLLQCFTPHHVYNPQTLMENEATKIYWDLTVITDRGVEHNRPDVVVWDKIAKTALIIDFAVPQDYNLSKSYTEKISKYEALAREMRDMWQLKKVNIKPIIISANGLVHRKTTEHLKELNLPQNTLMWMQKAVILGTVNIVRKVLYPH

SEQ ID NO: 32557 - protein, 1113 aa, Adalia bipunctata
MNKCLISAYFHVTEGEKHTKKYAEKLAERWMESYPDKHFTGKHLIAQVKNIKVRKLLAPDEIDQMREEAVRNSPVRRINNIRRSIELRRTLTRTEIDYDEQSSAEQHIPDHQHIALPDHDEVTEGILLLFQEISLKWEGITMEARPKIPKLQQNTNTKATVRAINAALEGIITASKNFEHLCHIVYCAAIVANTIHQTKTTNNENTNRTPQRPPWENRINTKINTLRKEIGILHSFLNNMNPSNKVKKKVQSYAKRMNLNPRVPQYHQKLKTRAEILKQKIAALGNRLRRFNKRTQRYRQNNLFTGNQKEFYRSLENDQGNLDAALPNPEDMRRFWSNVWSKGEDHNIEAPWIKTEIEELRELEEMAPIQVTEGDVRATISRMKNWTSPGVDGIQNYWWKTLTSTHKVLPRLICRALIHPDTIPEYFTHGITHLVPKKGDLRQPGNYRPITCLPSAYKIITSTVSFKINEHIKANNIMAWEQKGCKRKGRGSKELLMIDNMIAKQAKKRLKNIAVAWIDYQKAFDSVPHTWLLEVLRIYKVNRRVIALLEHLMTTWRTTLKVHNKSASYETSEVEIKRGIFQGDSLSPLWFCLALNILSKMLNRSTYGYSINEQIRISHLFYMDDIKLYARGRAQLEGLLELVRKYSEDIAMTFGLDKCATVNVRRGKMARGENIILSDGREVAGLRTEDRYKYLGVQQTFEIRNRENKDNTRNELLKRVKKVLRTQLSAKNKIMAINSWAIPTFTYTAGILSWSKTELEQVDRSIRTSLTQHGMLHPNSAVERLYLPRKEGGRGMANLGVAALKETEKINEYFRKSNLPVHQWVASCGRVSVSETPNEEVPENESQLEILRQAWKTKALHGRFYASLHQPEVDMKGTSTYLTQGYLFPQTEGTFFAIQDQVVPTRTYAKHIMKQAVDNTKCRLCNGAEESVQHLSSGCSAIVGTKYLARHNNMGKVVHQMLCLQKQLLQHFTPHHLYNPQTLMENKAIKIYWDLTVITDRGVEHNRPDVVVWNKVEKTALIIDFAVPQDYNLAKSYTEKIAKYEALAREMKDMWQLQSVNIKPLIISANGLVHSKTTEHLKELNLPPNTLMWMQKAVILGTVSIVRKVLYPH

SEQ ID NO: 32558 - protein, 1113 aa, Coccinella septempunctata
MNKCLISAYFHVTEGEKHTKKYAEKLVERWMETYPDKDFTGKHLIAQVKNIKTRKLLAPDEIDLMRAEAVRSSPVRRINNIRRSIELRKTLTRTDLDYAPPSNEEQPSPDHQHTTLPEPDEALEGILSLFQEYSLKWMGISMEARPKIPKLKQNTNTKETVRAINAALEGTIAASTNFEHLCHIVYCAAMVANTIHQTKNTNNDNTNRTPQKPPWENRINTKINTLRKEIGILHSYLNNIDPSNRVQKKVQSYARKMKLKQRDPQYLLKLKTRAEFLKQKIAALGNRLRRYNKRTQRYRQNNLFTGNQKEFYRSLEKDQGSLDITPPKPEDMRQFWSSVWSRGKDHNTEAPWIKTEIEELRELEEMTTVQVTEKDVRATIGRMKNWTSPGIDGIQNYWWKTLTSTHRVLARLICRALIHPDTVPEYFTHGITHLVPKKGDLRQPCNYRPITCLPSAYKIITSTVAFKINEHIKANKIMAWEQSGCKRKGRGSKELLMIDNMITKQAKKRLKNISMAWVDYQKAFDTVPHTWLLEVLKIYKVNRQVIALLEYLMTSWRTTLKVRTKSATYEIPKVEIRRGIFQGDSLSPLWFCLALNILSKILNKSAYGYSINEQIRISHLFYMDDLKLYARGKTQLEGLMELVRKYSEDIAMTFGLEKCATVNVKRGKMARGEDMVLSDGRDVAGLRAEDRYKYLGIQQTFEIRQRENKDNTKEELLRRVKKVLRTQLSAKNKIMAINSWAIPTFNYTAGILSWSKTELEEVDRSIRTLLTQHGMLHPNSAVERLYLLRKEGGRGMTNLGGAALKETEKINDFFQKSNLPIHQWVASCGRVSVSHTSNGEAPGNENQYEILRQSWKAKPLHGRFYVSLHQSEVDLLSTSTYLTQGYLFPQTEGTLFAIQDQVVPTRTYAKHIMKQAVVNTKCRLCNGAEESVQHLSSGCSAIVGTKYLARHNNMGKVVHQMLCLQKQLLHQFTPHHLYNPQTLMENEHTKIYWDLTVITDRGVEHNRPDVVVWDKVAKTALIIDFAVPQDHNLARAYTEKITKYEALAKEMKDMWQLKSVNIKPLIISSNGLVHRKTTEHLKELNLPQNSLMWMQKAVILGTVNIVRKVLYPH

SEQ ID NO: 32559 - protein, 1112 aa, Coccinella septempunctata
MNKCLLSAYFHVTEGEKQTRKYAEKLTERWLESYPDKQFTGKHLIAQVKNIKTLKLLSPDEIELMKAEALRNSPIRHIHNIRRSIQIRGTLTLAEDHDHQSYNEQPNSEPRPTDLPEADDATRGVLSLFEEINLKWKGVPMHIRPKIKKMHHNTNTKETMIVINAALEETIASSSNFEDLCHLVYCAAIFANFIHQTKMTDNTQENDTPHRPPWEERINKKINIFRKEIGILHAYLNSENPSKHVKKKAQIYSQKIKLKRSDAQYHLRLHTRMETLKQKIAALGNRLRRYSKRTRRYRENNLFANNQKEFYRRLENNQADIDKTPPQPEEMRQFWSNIWSHGKDHNTEAPWIKAELEDHSDLNEMAAIQVTEDDVRATIKRMKNWSSPGIDGIQNYWWKTLTSIHRVLARLIDTALVKPDTVPEYFTHGITHLLPKKGDSRLPSNYRTITCLPTAYKIITSTIAYKINGHIQANNIMAWEQNGCRKKGRGSKELLVIDNMLTKQAKKRLKNISMAWIDYRKAFDSVPHTWLLEILKIYKVNRQVIALLGHLMTTWRTTLRVHNEAATYHTAEVHIKRGIFQGDSLSPLWFCLALNILSKMLNRSTYGYSISEQIRLTHLFYMDDLKLYARGKAQLEGLMELVRTFSEDINMTFGLEKCATVTVRRGKMANRESVVLSDGRQVTGLSLEDRYKYLGVQQTYEIKQRENKEITKTELLRRVKKVLRTQLSAKNKMMAINSWAIPAFTYTAGVISWSKTELNEIDRNIRTSLTQHGMLHPNSAVERLYLPRREGGRGMMNIGESAVKETYKVKEYFRKSNLPIHQWVTSIGYLNTADGTHGEPSGRDDQAEILRQAWQAKSLHGRFYASLHQAEVDKQGTSTYLTEGYLFPQTEATFFAIQDQVVPTRTYAKHIMKQAVANTKCRLCNGAEESIQHLSSGCSTIAGTKYLARHDNMGKVVHQMMCLQKQLIQQFTPHHLYSPQTLVENEHTKIYWDFTVITDRGVEHNRPDMVVWDKTANTALIIDFAVPQDYNLTKTYNEKVSKYEALAQQMKDMWKLREIAIKPLIISTNGLVHRKTTQHLKELNLPKNTLLWMQKAVILGTVNIVRKVLYPH

SEQ ID NO: 32560 - protein, 1112 aa, Propylea japonica
MNKCLLSAYFHVTEGEKQTRKYAEKLTERWLETYPDKQFSGKHLIAQVKNIKTRKLLSPDEIELMKAEALRNSPIRHIHNIRRSIQIRRTLTLAEDHDHQSYNEQPNSEPRPTDLPETDDATRGVLSLFGEINLKWKGVPMHIRPKIKKMHHNTNTKETMRVINAALEETIASSSNFEDLCHLVYCAAIVANSIHETKMTDNTQENGTPQRPPWEDRINKKINIFRKEIGILHSYLSSENPSKRVKKKVQIYSQKMRLKRSDAQYHLRLQTRMETLKQKIAALGNRLRRYSKRTRRYRENNLFANNQKEFFRKLEDNQADIDKTPPQPEEMRQFWSNIWSHGKDHNTEALWIKAELEDLSDLNEMAAIQVTEDDVRATIKRLKNWSSPGIDGIQNYWWKTLTSTHRVLASLIDRALVKPDTVPEYFTHGITHLLPKKGDSRLPSNYRPITCLPTAYKIITSTIAYKINCHIQANNIMAWEQNGCRKKGRGSKELLVIDNMLTKQARKRLKNISMAWIDYRKAFDSVPHTWLLEVLKIYKVNRQVIALLGHLMTTWRTTLRVHNGAATYHTAEVHIKRGIFQGDSLSPLWFCLALNILSKMLNRSTYGYSISEQIRLTHLFYMDDLKLYARGKAQLEGLMELVRTFSEDINMTFGLEKCATVTVRRGKMANRESVVLSDGRQVTGLSLEDRYKYLGVQQTYEIKQRENKDITKTELLRRVKKVLRTQLSAKNKMMAINSWAIPTFIYTAGVISWSKTELNEIDRNIRTSLTQHGMLHPNSAVERLYLPRREGGRGMINIGESALKETYKVKEYFRKSNLPVHQWVTSSGYLETADGTHGELSGRDDQAEILRQAWQAKSLHGRFYASLHQAEVDKQGTNTYLTEGYLFPQTEATFFAIQDQVVPTRTYAKHIMKQAVANTKCRLCNGAEESIQHLSSGCSTIAGTKYLARHDNMGKVVHQMMCLQKQLIQQFTPHHLYSPQTLVENEHTKIYWDFTVITDRGVEHNRPDMVIWDKTANTALIIDFAVPQDYNLTKTYNEKVSKYEALAQQMKDMWKLREIAIKPLIISTNGLVHRKTTQHLKELNLPKNTLLWMQKAVILGTVNIVRKVLYPH

SEQ ID NO: 32561 - protein, 1104 aa, Harmonia axyridis
MNISLINAYFHVTEGETQTKKYAEKLAERWNETYPENQLTGKHLVAQVKNIKTRKLLAPDELDILKANAVRNSPTRRINNIRRSIQGGRVLPRQEINYEEEDIGEQPIPTPEPDEAALGIQALFQEASQKWRGVPMDVRPRISKIKQNKNTKCTMQAINSALSEFITASADLEELCHNMYCAAAVANDIQQTKNIVLNHKNLSPQRPPWETRIEKKITTLRKENGLLHSYLGTENPSNRVKEKIQQYARKLKLKRGEAQYHLRLRTHAENLKQKIAALGNRLRRYNKRTQRYRQNNLFTSNQKKFFRALDDDTGKPQSAPPKLEEVERYWSDIWSQGQKHNTEAHWIKTEIEEQRNLREMAAVTVSEEDVRATINRLKNWTSPGVDGIHNYWWKSLTSTHEVLSRFIQKALENPHSVPEYFTHGITHLLPKKGDLNQPGNYRPITCLSSAYKILTSTIAFKINSHLKNNNIMAWEQNGCKRKGRGSKELLIIDNMLTKQAKKKLKNISMAWIDYQKAFDSVPHSWLIEVLKIYKVNPQVIALLQYLMSTWRTTLTVRDGTATYKTTDVEIRRGIFQGDSLSPLWFCLALNILSRMLNRSAYAYSINDQAKLTHLVYMDDLKLYARGRKQLEGLLELVRKFSEDIGMSFGLEKCATVNVKRGKMSKEENIVLSDGREVASLRTEDRYKYLGIQQTYEIRHKENKEDTKNELLRRVRKILKSHLSAKNKLMAINIWAIPPFTYTAGLLTWSKTDLEQVDRSIRTSLTRHGMLHPNSAIERLYLPRKEGGRGMTNLEAACLKEKENINKYFLKTNLPVHQWVAATASPRVTDEDVAVSENRLEKFRQAWQAKPLHGRFYASLHQVEVDLQSSNTYLTQEYLLLQTEGTFLAIQDQVVPTRTYIKHILKQQVETTKCRLCNAAEESVQHLSSGCSSIAGTKYLNRHNNMGKVVHQLLGLQKQLIQHFIPHHIYTPQTILEDEQCKVYWDLTVITDIGVEHNRPDMVLWDKQNKTATIIDFAVPLDHNLAKSYAEKISKYEALSQQMKDMWRLRRVTIMPLVISANGLVHRKTIQHLQELNLPQNTITWIQKAVILGTVNIIRKVIYPH

SEQ ID NO: 32562 - protein, 1104 aa, Harmonia axyridis
MNISLINAYFHVTEGETQTKKYAEKLAERWNETYPENQLTGKHLVAQVKNIKTRKLLAPDELDILKANAVRNSPTRRINNIRRSIQGGRVLPRQEINYEEEDIGEQPIPTPEPDEAALGIQALFQEASQKWRGVPMDVRPRISKIKQNKNTKCTMQAINSALSEFITASADLEELCHNVYCAAAVANDIQQTKNTVLNHKNLSPQRPPWETRIEKKITTLRKEIGLLHSYLGTENPSNRVKEKIQQYARKLKLKRGEAQYHLRLRTHAENLKQKIAAMGNRLRRYNKRTQRYRQNNLFTSNQKKFFRALDDDTGKPQSAPPKLEEVERYWSDIWSQGQKHNTEAHWIKTEIEEQRNLREMAAVTVSEEDVRATINRLKNWTSPGVDGIHNYWWKSLTSTHEVLSRFIQKALENPHSVPEYFTHGITHLLPKKGDLNQPGNYRPITCLSSAYKILTSTIAFKINSHLKNNNIMAWEQNGCKRKGRGSKELLIIDNMLTKQAKKKLKNISMAWIDYQKAFDSVPHSWLIEVLKIYKVNPQVIALLQYLMSTWRTTLTVRGGTATYKTTDVEIRRGIFQGDSLSPLWFCLALNILSRMLNRSAYAYSINDQAKLTHLFYMDDLKLYARGRKQLEGLLELVRKFSEDVGMSFGLEKCATVNVKRGKMSEEENIVLSDGREVASLRTEDRYKYLGIQQTYEIRHKENKEDTKNELLRRVRKILKSHLSAKNKLMAINIWAIPPFTYTAGLLTWSKTDLEQVDRSIRTSLTRHGMLHPNSAIERLYLPRKEGGRGMTNLEEACLKEKENINKYFLKTNLPVHQWVAATASPRVTDEDVAVRENRLEKFRQAWQAKPLPGRFYASLHQVEVDLQSSNTYLTQGYLFPQTEGTFLAIQDQVVPTRTYIKHILKQQVETTKCRLCNAAEESVQHLSSGCSSIAGTKYLNRHNNMGKVVHQLLGLQKQLIQHFIPHHIYTPQTILEDEQCKVYWDLTVITDIGVEHNRPDMVLWDKQNKTATIIDFAVPLDHNLAKSYAEKISKYEALSQQMKDMWRLRRVTIMLLVISANGLVHRKTIQHLKELNLPQNTITWMQKAVILGTVNIIRKIIYPH

SEQ ID NO: 32563 - protein, 751 aa, Coccinella septempunctata
MEEMATITITEEDVRATISRMKNWASPGIDSIHNYWWKSLPSTHKVIARFISAALEDPDTVPKYFTHGNTILVPKSGDLSQPGNYRPITCLPSAYKILTSTIAFKINRHLKANNIMAWEQNGCKKKGRGSKELLVIDNLITKQAKKKLKNISMAWIDYRKAFDSVPHSWLLEVLRTYKVNKQVIKLLENLMSTWRTTLMVYNKAASYRTTEVHIKRGMFQGDGLSPMWFCLALNMLSKMLNRSSYGYSINDQTLITHLFYMDDLKLYAKGKKQLEGLLELVRRYSEDITMEFGLKKCATVNVRRGKITAEDSVILADGREITSLSTEDRYKYLGIQQSYEIKQKENKDNTKIELLKRVNKVLRSQLSAKNKITAINIWAVPSFTYTVGILSWSTTELGQVDRNIRNLLTKHGILHPNSAVERLYLPRKEGGRGMSSLEEVSLKEKEKMNSFFANSNLPVHRWVAAFRRGSTATETEGTEEPARDCLETFRQTWQAKALHGRFYTSLHQPEVDLESSNTYLIQGYLFPQTEGTFLAIQDQVVPTRTYVKYIMKQRIESTKCRLCNGAEESVQHLSSGCSAIAGTRYLSRHDNMGKVIHQLLCLQKHLLEKFTPHHLYSPQPVMENEQHKIYWDLTIVTDRSVEHNRPDMVIWDKVAKTALIIDFAVPQDYNLSKTYVEKITKYEALAQQIKDMWQLEKVKIMPLVISVNGLVPKRTTQHIKELNLPHNAIMWMQKAVILGTVNIIRRVLYPH

SEQ ID NO: 32564 - protein, 1196 aa, Coccinella septempunctata
MEAFDTQNEASETAPGVGTAPAGRPIQALADVSGASGIPLRNGTTRPRSSRNTQGYSLDPSNSSSELIQRDPAGTRRRERQRWSREMNLRLISAYFLVTEGETRTKKYADQLAVRWVESYPDKPFSGKHLVTQVKNIKTRRLLSPDEIERVKAEAIRNSPNRNINNLRRSIQRQSTLPQRRISYHQQREGQPEISRPTHLPEPEEARAILTLFREVNQKWRGVAMEARPRIPKIKHSIHTKHTMVVLNTALDESFTASEDFEDLCHRVYCVATVASNILDAKITSKSQQERTHQKPPWEDRIENKIKTLRKEIGILHSYLQSNNPSRKVEKKVLAYARKLKLKPSNPQYHIRLRTHQETLKQKIAALGNRLRRYHKRTERYRQNNLFASNQREFFRGLQRGRENKDATPPKPEEIREYWSDIWSHEKKHNQRAPWIKREIEECRDMEEMATITITEEDVRATISRMKNWASPGIDSIHNYWWKSLPSTHKVIARFISAALEDPDTVPKYFTHGNTILVPKSGDLSQPGNYRPITCLPSAYKILTSTIAFKINRHLKANNIMAWEQNGCKKKGRGSKELSVIDNLITKHAKKKLKNISMAWIDYRKAFDSVPHSWLLEVLRTYKVNKQVIKLLENLMSTWRTTLMVYNKAASYRTTELHIKRGMFQGDGLSPKWFCLALNMLSKMLNRSSYGYSINDQTLITHLFYMDDLKLYAKGKKQLEGRLELVRRYSEDITMEFGLKKCATVNVRRGKITAEDSVILADGREITSLSTEDRYKYLGIQQPYEIKQKENKDNTKIELLKRVNKVLRSQLSAKNKITAINIWAVPSFTYTVGILSWSTTELGQVDRNIRNLLTKHGILHPNSAVERLYLPRKEGGRGMSSLEEVSLKEKEKMNSFFANSNLPVHRWVAAFRRGSTATETEGTEEPARDCLETFRQTWQAKALHGRFYTSLHQPEVDLESSNTYLIQGYLFPQTEGTFLAIQDQVVPTRTYVKYIMKQRIESTKCRLCNGAEESVQHLSSGCSAIAGTRYLSRHDNMGKVIHQLLCLQKHLLEKFTPHHLYSPQPVMENEQHKIYWDLTIVTDRSVEHNRPDMVVWDKVAKTALIIDFAVPQDYNLSKTYVEKITKYEALAQQIKDMWQLEKVKIMPLVISVNGLVPKRTTQHIKELNLPHNAIMWMQKAVILGTVNIIRRVLYPH

SEQ ID NO: 32565 - protein, 972 aa, Coccinella septempunctata
MEARPRIPKIKHSIHTKHTMVVLNTALDESFTASEDFEDLCHRVYCVATVASNILDAKITSKSQQERTHQKPPWEDRIENKIKTLRKEIGILHSYLQSNNPSRKVEKKVLAYARKLKLKPSNPQYHIRLRTHKETLKQKIAALGNRLRRYHKRTERYRQNNLFASNQREFFRGLQRGRENKDATPPKPEEIREYWSDIWSHEKKHNQRAPWIKREIEECRDMEEMATITITEEDVRATISRMKNWASPGIDSIHNYWWKSLPSTHKVIARFISAALEDPDTVPKYFTHGNTILVPKSGDLSQPGNYRPITCLPSAYKILTSTIAFKINRHLKANNIMAWEQNGCKKKGRGSKELLVIDNLITKQAKKKLKNISMAWIDYRKAFDSVPHSWLLEVLRTYKVNKQVIKLLENLMSTWRTTLMVYNKAASYRTTEVHIKRGMFQGDGLSPMWFCLALNMLSKMLNRSSYGYSINDQTLITHLFYMDDLKLYAKGKKQLEGLLELVRRYSEDITMEFGLKKCATVNVRRGKITAEDSVILADGREITSLSTEDRYKYLGIQQSYEIKQKENKDNTKIELLKRVNKVLRSQLSAKNKITAINIWAVPSFTYTVGILSWSTTELGQVDRNIRNLLTKHGILHPNSAVERLYLPRKEGGRGMSSLEEVSLKEKEKMNSFFANSNLPVHRWVAAFRRGSTATETEGTEEPARDFLETFRQTWQAKALHGRFYTSLHQPEVDLESSNTYLIQGYLFPQTEGTFLAIQDQVVPTRTYVKYIMKHRIESTKCRLCNGAEESVQHLSSGCSAIAGTRYLSRHDNMGKVIHQLLCLQKHLLEKFTPHHLYSPQPVMENEQHKIYWDLTIVTDRSVEHNRPDMVVWDKVAKTALIIDFAVPQDYNLSKTYVEKITKYEALAQQIKDMWQLEKVKIMPLVISVNGLVPKRTTQHIKELNLPHNAIMWMQKAVILGTVNIIRRVLYPH

SEQ ID NO: 32566 - protein, 1107 aa, Desoria tigrina
MTENLTRRETRSRTRAQVNTLVGTSLVTPEEIPGGLVQLGSDVGSTMFACTECDRSFTTTSGRGVHMKRAHPSAHNAKINVERKNKVWLDEEIRMYAREEIRLRDQGIRNMNQALASAFEHLPNPRIGQSVAYIRRTDRYKTAVATALEEAPSVSNSPESSYTSEAMVDIEERLSELILSKPGEKFQEIRLNRIVRKALDGEGFETELVEYLVEIFSTKTASAAKNFVGNRPMTNLSETRDHAVGSVGPPREIRPKGARVPGPLFRRVYPEEAHSVRPQVRGEAGRNDELRSGIGIDGVAYKSKFKNKRKLNRSRRKAYAYMEFQRMYESDRGRLARGILDDRLDMKSNPIPKAVESWKGEFERTPSGIDTSDMKASPAYKKHVWGPVEEEELDIALKGFSRGSAAGPDEVSVPLLRSMPRPVILKILNLFLLNGSIPNVSRTSRTVLIPKVSDPKVYTELRPISISSVIVRVFNKILASRISATADLDLRQRAFLPADGCAENLAILESMIDNAKTQCKSVFLGWLDVKNAFGSIAHEVIFEALSLSGAPPVLVNYVKSLYTGFTTEISLGKEKCPAAINRGVLQGDPLSPILFNLVMNQLLKNLPDEIGVQLDEKTRMNSEAFADDLVLGSSTENGFSVLLKTMDTLGPKWGLEFHPRKCRYLALVASGKEKKVKTRCDLNFYLGGEKLVGLDIGETWKYLGMSFGSEGMVSVESKLPQYLCRLKKALLKPQQKLFILRVYLIPRLIYELTMTRPTAKKLHKYDRLIRAALHGEKGILHLPHSTPIAFFYAPVTSGGLGLMSFRVSVPAMIASRLERMLTSDSPYVRAAARSRSILVRKSMAKRIMYSCDGFPITSAIQAQEYHRKKLYDSVDGKALAQSQQVAGVHTWVSDGSKMMSGKAFVESIKIRINAMPTLSRLTRGTTRDRSCRAGCYVPETLNHVINQCQRTNGIRIKRHDVVSKKLGSFLRQKGHTIEEEPHIKISGGTFRKPDIIAYRGKKAVVIDTQIIGEWEPNAAHEAKVRKYSEYGEIVEHCKERGAETVEFSACIISYRGVVSSKSEEELGRIGVSKYMLKTLVVMAMERSCQVWHLFRTSTASHWRKKRT

SEQ ID NO: 32567 - protein, 1174 aa, Campodea augens
MEVDVFIIEQNDYNNNNNNNNNNNNNNSTNNSDYNTSNRTSSNGLGQCVSQVDPPIKQGRRKWSKEMNLNILRAYFRATKCENQLGNYKTNFFIEWKKLYPDLDITEQRICDQKRVIFQNLLLTSVEIEHIKEEIKIEISGEINKEIEINLNDSNEDVIQKPVTEELVVEHQSTVIDMCNNDIVPIEYVNMFESTYLQYNGISPKNWTPLPKVSFNQKTKYALDITNSYIAKVRYPTQSLEELHFVVYVAASTICQYLGLKTTPINEDGKSQFRSTSPRWKSRMENKISTLRSELTKLSNLNANVPGLKRRYENIIRKHNLNVNSETFPQQLLEIIDQLKQKVCALGKRLKRYNKCHLRKTDNKNFSSNEKLFYRKQNETHDGKYGKQPTAIDLEKFWGDIWSKEETYNHNATWLKEERQDNEFLPKMVHRNVTSQDLQIVLRRLKNWTSPGCDKIQNYWWKYLTSIHTTLVNCINNVLQNPDIIPHYLMEGRTVLIPKNEHTEDPKNYRPITCLSTLYKIMTSIISRRIEIFLTENGIITEEQKGCKRNSRGCKEQLLIDLVITKHSKRKKRNLAVAWIDYQKAYDSVPHSWLIDVLRLYKIDDTIVNFLQISMDYWKTTLSVKTGGTAINSNPIPIKCGIFQGDSWSPLWFVIALNPLSKYLNKCNELGYKLTSEKIVTHLFYMDDLKIYSSNESKLNSLLETVAIYTSDIRMKFGLEKCAKLISSKGIIKKSENISLEITNLKIKNLSEEDTYKYLGCIQTLTLQSNKVKTLFQEKYFSRVRKVLRTGLNGYNKVKAINTWCVPVLTYSFGIVPWSRTEIQGIDRKTRVLCTEFRIHHPKAATERLYIHRSQGGRGMIRLETQHIQQIENLKNYFLNKCSESPLHQAVVSCDDKLSPLNLISPVSPNVPDTLQTIEEWKRKPLHGRFPAALSETHESSTRWLSNAELYAETEGFICAIQDQVIRTRNYQKYIEKQNVPTDLCRICKQTTETIQHITSGCSCIANTEYLRRHNLSAAIIHQFLAKKYDLEYNGSPYYKYQPQPVLENEKALLYWDRTIITDRTILANRPDIVLVDKNCKTAYMIDVAHPNDHNLEQTFLTKRLKYQDLAREFKELRRLDQVIIVPVVVTANGLIHRNQFEYTQKLNLPEYIIYKIQKSVIMETCRIVRKIME

SEQ ID NO: 32568 - protein, 1108 aa, Campodea augens
MNLNILRAYFRATKCENQLGNYKTNFFIEWKKLYPDLDITEQRICDQKRVIFQNLLLTSVEIEHIKEEIKIEISGEINKEIEINLNDSNEDVIQEPVTEELVVEHQSTVIDMCNNDIVPIEYVNMFESTYLQYNGISPKNWTPLPKVSFNQKTKYALDITNSYIAKVRYPTQSLEELHFVVYVAASTICQYLGLKTTPINEDGKSQFRSTSPRWKSRMENKISTLRSELTKLSNLNANVPGLKRRYENIIRKHNLNVNSETFPQQLLEIIDQLKQKVCALGKRLKRYNKCHLRKTDNKNFSSNEKLFYRKQNETHDGKYGKQPTAIDLEKFWGDIWSKEETYNHNATWLKEERQDNEFLPKMVHRNVTSQDLQIVLRRLKNWTSPGCDKIQNYWWKYLTSIHTTLVNCINNVLQNPDIIPHYLMEGRTVLIPKNEHTEDPKNYRPITCLSTLYKIMTSIISRRIEIFLTENGIITEEQKGCKRNSRGCKEQLLIDLVITKHSKRKKRNLAVAWIDYQKAYDSVPHSWLIDVLRLYKIDDTIVNFLQISMDYWKTTLSVKTGGTAINSNPIPIKCGIFQGDSWSPLWFVIALNPLSKYLNKCNELGYKLTSEKIVTHLFYMDDLKIYSSNESKLNSLLETVAIYTSDIRMKFGLEKCAKLISSKGIIKKSENISLEITNLKIKNLSEEDTYKYLGCIQTLTLQSNKVKTLFQEKYFSRVRKVLRTGLNGYNKVKAINTWCVPVLTYSFGIVPWSRTEIQGIDRKTRVLCTEFRIHHPKAATERLYIHRSQGGRGMIRLETQHIQQIENLKNYFLNKCSESPLHQAVVSCDDKLSPLNLISPVSPNVPDTLQTIEEWKRKPLHGRFPAALSETHESSTRWLSNAELYAETEGFICAIQDQVIRTRNYQKYIEKQNVPTDLCRICKQTTETIQHITSGCSCIANTEYLRRHNLSAAIIHQFLAKKYDLEYNGSPYYKYQPQPVLENEKALLYWDRTIITDRTILANRPDIVLVDKNCKTAYMIDVAHPNDHNLEQTFLTKRLKYQDLAREFKELRRLDQVIIVPVVVTANGLIHRNQFEYTQKLNLPEYIIYKIQKSVIMETCRIVRKIME

SEQ ID NO: 32569 - protein, 940 aa, Hormaphis cornu
MARKEADLSFKKIRFMNQELVKYFDRTQEAIKKQRQSGNYREMVKKFIEEMQSGSSSEENESGSDEEGGNVNTCRRETNEQQHKLRDHLLNSGTSEVDNYNAKWLHKICSMVENSSRERVLLELAAYMRETFPPEKESRVSTGKQYKNTYKNNKIRRKAEYARVQDLWRRNAGECTRRILDDALEQGEGLQQHQMEPYWREVMESNTDVRPQLPDAQEILHHLWDPISESEIRLAHPANNTAAGLDGITPKKLREIPSSILARLLTLFMWCEQLPEEMYRSRTVLIPKKKNATSPSLFRPITVSSVFVRLFHRVLANRLATLNLDDRQRAFIKASGCAENMALLDLALSDRGRKKKKLFMAVLDLAKAFDSLSFAALEAVLTSRGLPERMINYIMLTYRRSNTILQHHGWQSGAIFPHRGVKQGDPLSPLLFNLVVDGLLRSVPSEVGLDVAGRRLNVLAFADDMILMASTENGLQLLIDHVSGYLEQCGLDINVGKSKTISWKTIPQQKKSVVDVTCKFKVKNHYIPTVDRSGKWKYLGVEFSADGITDPDVTKNLDSYLLKLTRAPLKPQQRLWALRTVVIPKLMYTLVFGRVKLSLLKQIDIKIRKSVRKWLALPKDCPNAYLHASISDGGLGIHSLRWYSPLERLRCLQRIKNSPYLEGGSTQTYLDDKIREMELRLKDNTNTVLRTNQLVNKFWARLLYTSVDGCGLRDSGDVVGQHRWVAEATRFLSGRDFVNSCKLRINALPTKSRTARGRQGDRNCRAGCHAKETSNHVIQVCHRTHGTRIRRHDAVANYLKRNLIKQGYTVDSEPHFQTSDGLRKPDIIATMGRTSIVIDAQVVGDQVDLGEANRKKINYYSRNESLSNLIRNKYGSSEILTLAATANWRGVWSKSSAADLMNRGVIRRCDLKVLSSRILIGGLASWNIFNKTTSIRQGVG

SEQ ID NO: 32570 - protein, 908 aa, Blattella germanica
MLMVIQIPSSANKFNVTLSNCKSSVRVLRRIPKGVRHYAADKLASVIDRCISINDEASYKDLLLFAYIAFHIPVTHNKGPERSLTSKIKDNLKDFSLTPLHFKVHKNNQDISKSRLVEAKVSDGDIKGAVRILSSDLGPPSFTREAFSNIMDKHPAPSRSLSFPDPPTSVDTSLSVTPSLVLRAIQSFPGGSASGIDGLRPQHFKDLTSPSSGDSGKRLLLSITNLCNFMLQGKVIQTMCPFLYGASLLALPKKDGGIRPIAVGNTIRRLVAKLACGSVKDEIGAYLRPHQLGFGSPQGCESIIHTVRTFLDMNVSSSKILLKLDIKNAFNSIERDSMLQIVKDKIPSLYPFLWQSYRYPSNLFFHRNVISSQTGAQQGDPTGPLLFSLTLHPIISKLNSQLNFFYLDDGVLCDEANVVLADFQKLIAECKSIGLDINPSKCELYFCSTIDEIVMSAFEKVAPGIKIVCRPELTLLGTPIMLEGIENIAQKKLESIKTFWERLLSLNSHTAYFLLKNCLAIPKLTYFIRTTPLWLFPSLLQYFDDGIRSTLESILNIPLDDHNWTQASLPINFGGLGIRKITDICLPAFMASAYGVSDFIKSVLSIQGDELVISHMADAFEVWDSVTGFQGTPSQPKIQKNWDLLSVSKIHQTLVNSLSSDQDQARLLAVQAKESSSWLQALPSSNVGTLLDDLSFRIAVALRLGCKLCQPHKCICGSWVDTYGHHGLSCPKSAGRFSRHFQLNDIIRRALISAKVPAVLEPVGINRTDGKRPDGLTLIPWTKGRSLIWDATCVDTLAPSHLASTSKTTGSAAASAANKKLNKYRDLVDQYFFVGFAVETMGPWCKEAKALVLDIGRRLISATGETRSCQYLSQRLSIAIQRGNATSIMGTFAESSSLDQIFYFHSFS

SEQ ID NO: 32571 - protein, 1017 aa, Blattella germanica
MDSVKCSLCRKDSKSVDNISILCDVCGLWFHGTCVNLCAEEIKTLGEDNNSWQCPTCLSYQHSHSSQADTTDLLPCPVCKLSNKDEKLFKGSRGLRIHWSRTHPNESPISILEEHHPSSANKFNVTLSNCKSSVRVLRRIPKGVRHYAADKLASVIDRCISINDEASYKDLLLFAYIAFHIPVTHNKGPERSLTSKIKDNLKDFSLTPLHFKIHKNNQDISKSRLVEAKVSDGDIKGAVRILSSDLGPPSFTREAFSNIMDKHPAPSRSLSFPDPPTSVDTSLSVTPSLVLRAIQSFPGGSASGIDGLRPQHFKDLTSPSSGDSGKRLLLSITNLCNFMLQGKVIQTMCPFLYGASLLALPKKDGGIRPIAVGNTIRRLVAKLACGSVKDEIGAYLRPHQLGFGSPQGCESIIHTVRTFLDMNVSSSKILLKLDIKNAFNSIERDSMLQIVKDKIPSLYPFLWQSYRYPSNLFFHRNVISSQTGAQQGDPTGPLLFSLTLHPIISKLNSQLNFFYLDDGVLCDEANVVLADFQKLIAECKSIGLDINPSKCELYFCSTIDEIVTSAFEKVAPGIKIVCRPELTLLGTPIMLEGIENIAQKKLESIKTFWERLLSLNSHTAYFLLKNCLAIPKLTYFIRTTPLWLFPSHLQYFDDGIRSTLESILNIPLDDHNWTQASLPINFGGLGIRKITDICLPAFMASAYGVSDFIKSVLSIQGDELVISHMADAFEVWDSVTGFQGTPSQPKIQKNWDLLSVSKIHQTLANSLSSDQDQARLLAVQAKESSSWLQALPSSNVGTLLDDLSFRIAVALRLGCKLCQPHKCICGSWVDTYGHHGLSCPKSAGRFSRNFQLNDIIRRALISAKVPAVLEPVGINRTDGKRPDGLTIIPWTKGRSLIWDATCVDTLAPSHLASTSKTTGSAAASAANKKLNKYRDLVDQYFFVGFAVETMGPWCKEAKALVLDIGRRLISATGETRSCQYLSQRLSIAIQRGNATSIMGTFAESSSLDQIFYFHPFS

SEQ ID NO: 32572 - protein, 963 aa, Dermanyssus gallinae
MHPGSNAYRQPATEDTRVQLSYMTSHIQFVFKNVRMIRIIPKTARRFVLECLVKVVNDVVTYNHNSAWLSLLSFGPVILRLPNVKNESCSLADIIRSNLRDFENGLRLDGLAGQVGHQKHRKIGTSEEDLKRRVVAKLTDGDVSGAARLISSCDTFGAESDHVEALRDKHPCAPTDLRWTDPPAESSPAESFHVSREDIYRAVGSFSRSSAADLDFIRPRLLQDLLSRAMGKRAEALADLLAKLIKILLRGEPPRDLIQIIFGARLFALKKKDGTTRPIACSSTLRRIAAKIAWWKNSSQIEEAIGDHQLGFAARSGTEVAIHAARAYLESRSEDIVMVKLDFQNAFNNVRRDHLLKAVVSHAPDLYHYFVQAYRNPTQLLLMDHVILSQSGLQQGDPLGPPLLCLAIKELIDSLESPFNVWYLDDGVLAGDPVIVARDIRKILDFATKSGLCLNPQKCELFVSGSSISDSSIRLITDLLPECIRTNRANLTLLGVPLLDDGKEEQLSGWVDKLKSSSSRLGLLGAHRGLFLLRSCFSTARVNYLLRGIDLTQDLNIPEQLNTHTLNSLSSLLNLSLPETARRQALLPVPKEGLGIPDAILVAGPAVVASMSSTWHRASKILDFPAVERLRSLLEDSKECLLARTGAPPPEEPTSQASWTAPLEDIQLANLFNSTEDEVEKARLRAVSSSGAGAWLNALPSAPVGTLLDDFVVRICVGLPLVEEHECSCGEKVSPLGHHGLSCIRSLGRRTRHAALNDTLARALRSSGYPCVLEPAGLYTDDSRRPDGMTLKAFEGGKTLVWDATVTDSIAPSIVSHGATQAGYAVLHAERNKCRKYAHIGDSMDFRPFAFETLGGPGKITEGVITKICKCLRLATGDPRAGDFFRQRLSLDIRGVFKKYHFCVFSKIIHLFINIYFVPFKVIPMRYYTLVPTVFPIFEALQKTIFFLSCSAPPSMPSLSRQA

SEQ ID NO: 32573 - protein, 968 aa, Dermanyssus gallinae
MLIMPDNTLSSQDPAVPSSSSASHKSDCPICRKTFTSRGLRRHINSMHPGSNAYRQPATEDTRVQLSYMTSHIQFVFKNVRMIRIIPKTARRIVLECLVKVVNDVVTYNHASAWLSLLSFGPVILRLPNVKNESCSLADIIRSNLRDFENGLRLDGLAGRVGHQKHRKIGTSEEDLKRRVVAKLTDGDVSGAARLISSCDTFGVESDHVEALRDKHPCAPTDLRWTDPPAEASPAQSFHVSREDIYRAVGSFPRSSAAGLDFIRPRLLQDLLSRAMGKRAEALADALAKLIEILLRGEPPRDLIPIIFGARLFALKKKDGTTRPIACSSTLRRIAAKIACWKNSSQIEEAIGDHQLGFAARSGTEVAIHAARAYLESRSEDIVMVKLDFQNAFNSVRRDHLLKAVVSHAPDLYHYFVQAYRNPTQLLLMDHVILSQSGLQQGDPLGPPLFCLAIKELIDSLESPFNVWYLDDGVLAGDPVTVARDIQKILDFATKSGLCLNPQKCELFVSGSSISDSSIRLIADLLPECIRTNKANLTLLGVPLLDDGKEGQLSGWVDKLKSSSSRLGLLGAHRGLFLLRSCFSTARVNHLLRGIDLTQDLNILEHLNTHTLNSLTSLLNLSLPETARRQALLPVAKGGLGIPDAVLVAGPAVVASMSSTLHRASKILDFPAVERLRCLLEDSKECLLARTGAPPPEEPTSQASWTAPLEDIQLANLFNSTEDEVEKARLRAVSSSGAGAWLNALPSAPVGTLLDDFVVRICVGLRLGVPLVKEHVCSCGEKVSPLGHHGLSCIRSLGRRTRHAALNDTLARALRSSGYPCVLEPAGLYTDDSRRPDGMTLTAFEGGKTLVWDATVTDSLAPSMVSHGATQAGYAVSHAERNKCRKYAHIGDSMDFRPFAFETLGGPGKITEGVITKICKCLRLATGDPRAGDFFRQRLSLDIQRGNATAVLGTLSKWSTPGLDLGLM

SEQ ID NO: 32574 - protein, 961 aa, Dermanyssus gallinae
MLIMPDNTLSSQDPAVPSSSSASHKSDCPICRKTFTSRGLRRHINSMHPGSNAYRQPATEDTRVQLSYMTSHIQFVFKNVRMIRIIPKTARRIVLECLVKVVNDVVTYNHASAWLSLLSFGPVILRLPNVKNESCSLADIIRSNLRDFENGLRLDGLAGRVGHQKHRKIGTSEEDLKRRVVAKLTDGDVSGAARLISSCDTFGVESDHVEALRDKHPCAPTDLRWTDPPAEASPAESFHVSREDIYRAVGSFPRSSAAGLDFIRPRLLQDLLSRAMGKRAEALADALAKLIEILLRGEPPRDLIPIIFGARLFALKKKDGTTRPIACSSTLRRIAAKIACWKNSSQIEEAIGDHQLGFAARSGTEVAIHAARAYLESRSEDIVMVKLDFQNAFNSVRRDHLLKAVVSHAPDLYHYFVQAYRNPTQLLLMDHVILSQSGLQQGDPLGPPLFCLAIKELIDSLESPFNVWYLDDGVLAGDPVTVARDIQKILDFATKSGLCLNPQKCELFVSGSSISDSSIRLITDLLPECIRTNKANLTLLGVPLLDDGKEGQLSGWVDKLKSSSSRLGLLGAHRGLFLLRSCFSTARVNHLLRGIDLTQDLNILEHLNTHTLNSLTSLLNLSLPETARRQALLPVAKGGLGIPDAVLVAGPAVVASMSSTWHRASKILDFPAVERLRCLLEDSKECLLARTGAPPPEEPTSQASWTAPLEDIQLANLFNSTEDEVEKARLRAVSSSGAGAWLNALPSAPVGTLLDDFVVRICVGLRLGVPLVEEHVCSCGEKVSPLGHHGLSCIRSLGRRTRHAALNDTLARALRSSGYPCVLEPAGLYTDDSRRPDGMTLTAFEGGKTLVWDATVTDSLAPSMVSHGATQAGYAVSHAERNKCRKYAHIGDSMDFRPFAFETLVKLLRELLLRYASVSDWLRETHALVIFFGKGYHWIYNVETPRRCLAPCPSGLHQAWT

SEQ ID NO: 32575 - protein, 968 aa, Dermanyssus gallinae
MLIMPDNTLSSQDPAVPSSTSASHKSDCPICRKTFTSRGLRRHINSMHPGSNAYRQPATEDTRVQLSYMTSHIQFVFKNVRMIRIIPKTARRIVLECLVKVVNDVVTYNHASAWLSLLSFGPVILRLPNVKNESCSLADIIRSNLRDFENGLRLDGLAGRVGHQKHRKIGTSEEDLKRRVVAKLTDGDVSGAARLISSCDTFGVESDHVEALRDKHPCAPTDLRWTDPPAEASPAESFHVTREDIYRAVGSFPRSSAAGLDFIRPRLLQDLLSRAMGKRAEALADALAKLIEILLRGEPPRDLIPIIFGARLFALKKKDGTTRPIACSSTLRRIAAKIACWKNSSQIEEAIGDHQLGFAARSGTEVAIHAARAYLESRSEDIVMVKLDFQNAFNSVRRDHLLKAVVSHAPDLYHYFVQAYRNPTQLLLMDHVILSQSGLQQGDPLGPPLFCLAIKELIDSLESPFNVWYLDDGVLAGDPVTVARDIQKILDFATKSGLCLNPQKCELFVSGSSISDSSIRLITDLLPECIRTNKANLTLLGVPLLDDGKEEQLSGWVDKLKSSSSRLGLLGAHRGLFLLRSCFSTARVNHLLRGIDLTQDINILEQLNTHTLNSLTSLLNLSLPETARRQALLPVAKGGLGIPDAVLVAGPAVVASMSSTWHRASKILDFPAVERLRCLLEDSKECLLARTGAPPPEEPTSQASWTAPLEDTQLANLFNSTEDEVEKARLRAVSSSGAGAWLNALPSAPVGTLLDDFVVRICVGLRLGVPLVEEHVCSCGEKVSPLGHHGLSCIRSLGRRTRHAALNDTLARALRSSGYPCVLEPAGLYTDDSRRPDGMTLTAFEGGKTLVWDATVTDSLAPSMVSHGATQAGYAVSHAERNKCRKYAHIGDSMDFRPFAFETLGGPGKITEGVITKICKCLRLATGDPRAGDFFRQRLSLDIQRGNATAVLGTLSRWSTPGLDLGLM

SEQ ID NO: 32576 - protein, 968 aa, Dermanyssus gallinae
MLIMPDNTLSSQDPAVPSSSSASHKSDCPICRKTFTSRGLRRHINSMHPGSNAYRQPATEDTRVQLSYMTSHIQFVFKNVRMIRIIPKTARRFVLECLVKVENDVVTYNHNSAWLSLLLFGPLILRLPNVKNESCSLADIIRSNLRDFENGLRLDGLAGQVGHQKHRKIGTSEEDLKRRVVAKLTDGDVSGAARLISSCDTFGAESDHVEALRDKHPCAPTDLRWTDPPAESSPAESFHVSKEDIYRAVGSFSRSSAAGLDFIRPRLLQDLLSRAMGKRAEALADALAKLIEILLRGEPPRDLRPIIFGARLFALKKKDGTTRPIACSSTLRRIAAKIACWKNSSRIEEAIGDHQLGFAARSGTEVAIHAARAYLESRSEDIVMVKLDFQNAFNNVRRDHLLKAVVSHAPDLYHYFVQAYRNPTQLLLMDHVILSQSGLQQGDPLGPPLFCLAIKELIDSLESPFNVWYLDDGVLAGDPVIVARDIRKILDFATKSGLCLNPQKCELFVSGSSISDSSIRLITDLLPECIRTNRANLTLLAVPLLDDGKEEQLSGWVDKLKSSSSRLGLLGAHRGLFLLRSCFSTARVNHLLRGIDLTQDLNILEQLNTHTLNSLSSLLNLSLPETARRQALLPVANGGLGIPDAVLVAGPAVVASMSSTWHRASKILDFPAVERLRSLLEDSKECLLARTGAPPPEEPTSQASWTAPLEDIQLANIFNSTEDEVEKARLRAVSSSGAGAWLNALPSAPVGTLLDDFVVRICVGLRLGVPLVEEHECSCGEKVSPLGHHGLSCIRSLGRRTRHAALNDTLARALRSSGYPCVLEPAGLYTDDSRRPDGMTLTAFEGGKTLAWDATVTDSLAPSMVSHGATQAGYAVSHAERNKCRKYAHIGDSMDFRPFAFETLGGPGKITEGVITKICKCLRLATGDPRAGDFFRQRLSLDIQRGNATAVLGTLSRWSTPGLDLGLM

SEQ ID NO: 32577 - protein, 968 aa, Dermanyssus gallinae
MLIMPDNTLSSQDPAVPSSTSASHKSDCPICRKTFTSRGLRRHINSMHPGSNAYRQPATEDTRVQLSYMTSHIQFVFKNVRMIRIIPKTARRIVLECLVKVVNDVVTYNHASAWLSLLSFGPVILRLPNVKNESCSLADIIRSNLRDFENGLRLDGLAGRVGHQKHRKIGTSEEDLKRRVVAKLTDGDVSGAARLISSCDTFGVESDHVEALRDKHPCAPTDLRWTDPPAEASPAESFHVTREDIYRAVGSFPRSSAAGLDFIRPRLLQDLLSRAMGKRAEALADALAKLIEILLRGEPPRDLIPIIFGARLFALKKKDGTTRPIACSSTLRRIAAKIACWKNSSQIEEAIGDHQLGFAARSGTEVAIHAARAYLESRSEDIVMVKLDFQNAFNSVRRDHLLKAVVSHAPDLYHYFVQAYRNPTQLLLMDHVILSQSGLQQGDPLGPPLFCPAIKELIDSLESPFNVWYLDDGVLAGDPVTVARDIQKILDFATKSGLCLNPQKCELFVSGSSISDSSIRLITDLLPECIRTNKANLTLLGVPLLDDGKEEQLSGWVDKLKSSSSRLGLLGAHRGLFLLRSCFSTARVNHLLRGIDLTQDINILEQLNTHTLNSLTSLLNLSLPETARRQALLPVAKGGLGIPDAVLVAGPAVVASMSSTWHRASKILDFPAVERLRCLLEDSKECLLARFGAPPPEEPTSQASWTAPLEDIQLANLFNSTEDEVEKARLRAVSSSGAGAWLNALSSAPVGTLLDDFVVRICVGLRLGVPLVEEHVCSCGEKVSPLGHHGLSCIRSLGRRTRHAALNDTLARALRSSGYPCVLEPAGLYTDDSRRPDGMTLTAFEGGKTLVWDATVTDSLAPSMVSHGATQAGYAVSHAERNKCRKYAHIGDSMDFRPFAFETLGGPGKITEGVITKICKCLRLATGDPRASDFFRQRLSLDIQRGNATAVLGTLSRWSTPGLDLGLM

SEQ ID NO: 32578 - protein, 967 aa, Dermanyssus gallinae
MLIMPDNTLSSQDPAVPSSTSASHKSDCPICRKTFTSRGLRRHINSMHPGSNAYRQPATEDTRVQLSYMTSHIQFVFKNVRMIRIIPKTARRIVLECLVKVNDVVTYNHALAWLSLLSFGPVILRLPNVKNESCSLADIIRSNLRDFENGLRLDGLAGRVGHQKHRKIGTSEEDLKRRVVAKLTDGDVSGAARLISSCDTFGVESDHVEALRDKHPCAPTDLRWTDPPAEASPAESFHVTREDIYRAVGSFPRSSAAGLDFIRPRLLQDLLSRAMGKRAEALADALAKLIEILLRGEPPRDLIPIIFGARLFALKKKDGTTRPIACSSTLRRIAAKIACWKNSSQIEEAIGDHQLGFAARSGTEVAIHAARAYLESRSEDIVMVKLDFQNAFNSVRRDHLLKAVVSHAPDLYHYFVQAYRNPTQLLLMYHVILSQSGLQQGDPLGPPLFCLAIKELIDSLESPFNVWYLDDGVLAGDPVTVARDIQKILDFATKSGLCLNPQKCELFVSGSSISDSSIRLITDLLPECIRTNKANLTLLGVPLLDDGKEEQLSGWVDKLKSSSSRLGLLGAHRGLFLLRSCFSTARVNHLLRGIDLTQDINILEQLNTHTLNSLTSLLNLSLPETARRQALLPVAKGGLGIPDAVLVAGPAVVASMSSTWHRASKILDFPAVERLRCLLEDSKECLLARTGAPPPEEPTSQASWTAPLEDIQLANLFNSTEDEVEKARLRAVSSSGAGAWLNALPSAPVGTLLDDFVVRICVGLRLGVPLVEEHVCSCGEKVSPLGHHGLSCIRSLGRRTRHAALNDTLARALRSSGYPCVLEPAGLYTDDSRRPDGMTLTAFEGGKTLVWDATVTDSLAPSMVSHGATQAGYAVSHAERNKCRKYAHIGDSMDFRPFAFETLGGPGKITEGVITKICKCLRLATGDPRAGDFFRQRLSLDIQRGNATAVLGTLSRWSTPGLDLGLM

SEQ ID NO: 32579 - protein, 968 aa, Dermanyssus gallinae
MLIMPDNTLSSQDPAVPSSTSASHKSDCPICRKTFTSRGLRRHINSMHPGSNAYRQPATEDTRVQLSYMTSHIQFVFKNVRMIRIIPKTARRIVLECLVKVVNDVVTYNHASAWLSLLSFGPVILRLPNVKNESCSLADIIRSNLRDFENGLRLDGLAGRVGHQKHRKIGTSEEDLKRRVVAKLTDGDVSGAARLISSCDTFGVESDHVEALRDKHPCAPTDLRWTDPPAEASPAESFHVTREDIYRAVGSFPRSSAAGLDFIRPRLLQDLLSRAMGKRAEALADALAKLIEILLRGEPPRDLIPIIFGARLFALKKKDGTTRPIACSSTLRRIAAKIACWKNSSQIEEAIGDHQLGFAARSGTEVAIHAARAYLESRSEDIVMVKLDFQNAFNSVRRDHLLKAVVSHAPDLYHYFVQAYRNPTQLLLMDHVILSQSGLQQGDPLGPPLFCLAIKELIDSLESPFNVWYLDDGVLAGDPVTVARDIQKILDFATKSGLCLNPQKCELFVSGSSISDSSIRLITDLLPECIRTNKANLTLLGVPLLDDGKEEQLSGWVDKLKSSSSRLGLLGAHRGLFLLRSCFSTARVNHLLRGIDLTQDINILEQLNTHTLNSLTSLLNLSLPETARRQALLPVAKGGLGIPDAVLVAGPAVVASMSSTWHRASKILDFPAVERLRCLLEDSKECLLARTRAPPPEEPTSQASWTAPLEDTQLANLFNSTEDEVEKARLRAVSSSGAGAWLNALPSAPVGTLLDDFVVRICVGLRLGVPLVEEHVCSCGEKVSPLGHHGLSCIRSLGRRTRHAALNDTLARALRSSGYPCVLEPAGLYTDDSRRPDGMTLTAFEGGKTLVWDATVTDSLAPSMVSHGATQAGYAVSHAERNKCRKYAHIGDSMDFRPFAFETLGGPGKITEGVITKICKCLRLATGDPRAGDFFRQRLSLDIQRGNATAVLGTLSRWSTPGLDLGLM

SEQ ID NO: 32580 - protein, 896 aa, Dermanyssus gallinae
MYILYKNVRMIRIIPKTARRFVLECLVKVVNDVVTYNHNSAWLSLLSFGPVILRLPNVKNESCSLADIIRSNLRDFENGLRLDGLAGRVDHQKHRKIGTSEEDLKRKVVAKLTDGDVSGAARLISSCDTFGVESDHVEALRDKHPCAPTDLRWTDPPAESSPAESFHVSREDIYRAVGSFSRSSAAGLDFIRPRLLQDLLSRAMDKRAEALADALAKLIEILLRGEPPRDLIPIIFGARLFALKKKDGTTRPIACSSTLRRIAAKIACWKNSSQIEEAIGDHQLGFAARSGTEVAIHAARAYLESRSEDIVMVKLDFQNAFNNVRRDHLLKAVVSHAPDLYHYFVQAYRNPTQLLLMDHVILSQSGLQQGDPLGPPLFCLAIKELIDSLESPFNVWYLDDGVLAGDPVIVARDIRKILDFATKSGLCLNPQKCELFVSGSSISDSSIRLITDLLPECIRTNRANLTLLGVPLLDDGKEEQLSGWVDKLKSSSSRLGLLGAHRGLFLLRSCFSTARVNHLLRGIDLTQDLNILEQLNTHTLNSLSALLNLSLPETARRQALLPVAKGGLGIPDAVLVAGPAVVASMSSTWHRASKILDFPAVERLRSLLEDSKECLLARTGAPPPEEPTSQASWTAPLEDIQLANLFNSTEDEVEKARLRAVSSSGAGAWLNALPSAPVGTLLDDFVVRICVGLRLGVPLVEEHECSCGEKVSPLGHHGLSCIRSLGRRTRHAALNDTLARALRSSGYPCVLEPAGLYTDDSRRPDGMTLTAFEGGKTLVWDATVTDSIAPSMVSHGATQAGYAVSHAERNKCRKYAHIGDSMDFRPFAFETLGGPGKITEGVITKICKCLRLATGDPRAGDFFRQRLSLDIQRGNATAVLGTLSRWSTPGLDLGLM

SEQ ID NO: 32581 - protein, 968 aa, Dermanyssus gallinae
MLIMPDNTLSSQDPAVPSSTSASHKSDCPICRKTFTSRGLRRHINSMHPGSNAYRQPATEDTRVQLLYMTSHIQFVFKNVRMIRIIPETARRIVLECLVKVVNDVVTYNHASAWLSLLSFGPVILRLPNVKNESCSLADIIRSNLRDFENGLRLDGLAGRVGHQKHRKIGTSEEDLKRRVVAKLTDGDVSGAARLISSCDTFGVESDHVEALRDKHPCAPTDLRWTDPPAEASPAESFHVTREDIYRAVGSFPRSSAAGLDFIRPRLLQDLLSRAMGKRAEALADALAKLIEILLRGEPPRDLIPIIFGARLFALKKKDGTTRPIACSSTLRRIAAKIACWKNSSQIEEAIGDHQLGFAARSGTEVAIHAARAYLESRSEDIVMVKLDFQNAFNSVRRDHLLKAVVSHAPDLYHYFVQAYRNPTQLLLMDHVILSQSGLQQGDPLGPPLFCLAIKELIDSLESPFNVWYLDDGVLAGDPVTVARDIQKILDFATKSGLCLNPQKCELFVSGSSISDSSIRLITDLLPECIRTNKANLTLLGVPLLDDGKEEQLSGWVDKLKSSSSRLGLLGAHRGLFLLRSCFSTARVNHLLRGIDLTQDINILEQLNTHTLNSLTSLLNLSLPETARRQALLPVAKGGLGIPDAVLVAGPAVVASMSSTWHRASKILDFPAVERLRCLLEDSKECLLARTGAPPPEEPTSQASWTAPLEDIQLANLFNSTEDEVEKARLRAVSSSGAGAWLNALPSAPVGTLLDDFVVRICVGLRLGVPLVEEHVCSCGEKVSPLGHHGLSCIRSLGRRTRHAALNDTLARALRSSGYPCVLEPAGLYTDDSRRPDGMTLTAFEGGKTLVWDATVTDSLAPSMVSHGATQAGYAVLHAERNKCRKYAHIGDSMDFRPFAFETLGGPGKITEGVITKICKCLRLATGDPRAGDFFRQRLSLDIQRGNATAVLGTLSRWSTPGLDLGLM

SEQ ID NO: 32582 - protein, 885 aa, Dermanyssus gallinae
MPDNTLSSQSPAVPSSSSASHTSDCPICRKTFTSRGLRRHINSMHPGSNAYRQPATEDTRVHLSYVTSHIQFVFKNVRMIRIIPKTARRFVLECLVKVVNDVVTYNHNSAWLSLLSFGPVILRLPNVKNESCSLADIIRSNLRDFENGLRLDGLAGRVGHQKHRKIGTSEEDLKRRVVAKLTDGDVSGAARLISSCDTFGVESDHVEALRDKHSCAPTDLRWTDPPAEASPAESFHVSREDIYRAVGSFSRSSAAGLDFIRPRLLQDLLSRAMGKRAEALADALAKLIETLLRGEPPRDLIPIIFGARLFALKKKDGTTRPIACSSTLRRIAAKIACWKNSSQIEEAIGDHQLGFAARSGTEVAIHAARAYLESRSEDIVMVKLDFQNAFNSVRRDHLLKAVVSHAPDLYHYFVQAYRNPTQLLLMDHVILSQSGLQQGDPLGPPLFCLAIKELIDSLESPFNVWYLDDGVLAGDPVIVARDIRKILDFATKSGLCLNPQKCELFVSGSSISDSSIRLITDLLPECIRTNKANLTLLGVPLLDDGKEEQLSGWVDKLKSSSSRLGLLGAHRGLFLLRSCFSTARVNHLLRGIDLTQDLNILEQLNTHTLNSLSSLLNLSLPETARRQALLPVAKGGLGIPDAVLVAGPAVVASMSSTWHRASKILDFPAVERLRSLLEDSKECLLARTGAHPPEEPTSQVSWTAPLEDIQLANLFNSTEDEVEKARLRAVSSSGAGAWLNALPSAPVGTLLDDFVVRICVGLRLGVPLVEEHECSCGEKVSPLGHHGLSCIRSLGRRTRHAALNDTLARALRSSGYPCVLEPAGLYTDDSRRPDGMTLTAFEGGKTLVWDATVTDSSTFNGQSRRYPGWLCCFACGKKQVSEVCT

SEQ ID NO: 32583 - protein, 968 aa, Dermanyssus gallinae
MLIMPDNTLSSQDPAVPSSSSASHKSDCPICRKTFTSRGLRRHINSMHPGSNAYRQPATEDTRVQLSYMTSHIQFVFKNVRMIRIIPKTARRIVLECLVKVVNDVVTYNHASAWLSLLSFGPVILRLPNVKNESCSLADIIRSNLRDFENGLRLDGLAGRVGHQKHRKIGTSEEDLKRRVVAKLTDGDVSGAARLISSCGTFGVESDHVEALRDKHPCAPTDLRWTDPPAEASPAESFHVSREDIYRAVGSFPRSSAAGLDFIRPRLLQDLLSRAMGKRAEALADALAKLIEILLRGEPPRDLIPIIFGARLFALKKKDGTTRPIACSSTLRRIAAKIACWKNSSQIEEAIGDHELGFAARSGTEVAIHAARAYLESRSEDIVMVKLDFQNAFNSVRRDHLLKAVVSHAPDLYHYFVQAYRNPTQLLLMDHVILSQSGLQQGDPLGPPLFCLAIKELIDSLESPFNVWYLDDGVLAGDPVTVARDIQKILDFATKSGLCLNPQKCERFVSGSSISDSSIRLITDLLPECIRTNKANLTLLGVPLLDDGKEGQLSGWVDKLKSSSSRLGLLGAHRGLFLLRSCFSTARVNHLLRGIDLTQDLNILEHLNTHTLNSLTSLLNLSLPETARRQALLPVAKGGLGIPDAVLVAGPAVVASMSSTWHRASKILDFPAVERLRCLLEDSKECLLARTGAPPPEEPTSQASWTAPLEDIQLANLFNSTEDEVEKARLRAVSSSGAGAWLNALPSAPVGTLLDDFVVRICVGLRLGVPLVEEHVCSCGEKVSPLGHHGLSCIRSLGRRTRHAALNDTLARALRSSGYPCVLEPAGLYTDDSRRPDGMTLTAFEGGKTLVWDATVTDSLAPSMVSHGATQAGYAVSHAERNKCRKYAHIGDSMDFRPFAFETLGGPGKITEGVITKICKCLRLATGDPRAGDFFRQRLSLDIQRGNATAVLGTLSKWSTPGLDLGLM

SEQ ID NO: 32584 - protein, 957 aa, Dermanyssus gallinae
MPDNTLSSQDPAVPSSSSASHKSDCPICRKTFTSRGLRRHINSMHPGSNAYRQPATEDTRVQLSYMTSHIQFVFKNVRMIRILPKTARRFVLECPVKVVNDVVTYNHNSAWLSLLSFGPVTLRLPNVKNESCSLADIIRSNLRDFENGLRLDGLAGRVGHQKHRKIGTSEEDLKRRVVAKLTDDNVSGAARLISSCDTFGVESDHVEALRDKHPCAPTALRWTDPPAEASPAESFHVSREDIYRAVESFSRSSAAGLDFIRPRLLQDLLSRAMGKRAEALADALAKLIEILLRGEPPRDLIPIIFGARLFALKKKDGTTRPIACSSTLRRIAAKIACWKNSSQIQEAIGDHQLSFAARSGTEVAIHAARAYLESRSEDIVMVKLDFQNAFNSVRRDHLLKAVVSYAPDLYHYFVQAYRNPTQLLLMDHVLLSQSGLQQGDPLGPPLFCLAIKELIDSLESLFNVWYLDDGVLAGDPVTVARDIRKILDFATKSGLCLNPQKCELFVSGSSISDSSIRLITDLLPECIRTNKANLTLLGVPLLDDGKEEQLSGWVDKLKSSSSRLGLLGAHRGLFLLRSCFSTAQVNHLLRGIDLTQDLNILEQLNTHTLNSLSSLLNLSLPETARRQALLLVAKGGLGIPDAVLVAGPAVVASMSSTWHRASKILDFPAVERLCSLLEDSKECLLARTGAPPPEEPTSQASWAAPLEDIQLANLFNSTEDEVEKARLQAVSSSGAGAWLNALPSAPVGTLLDDFVVRICVGLRLGVPLVEKHECSCGEKVSPFGHHGLSCIRSLGRRTRHAALNETLARALRSSGYPCVLEPAGLYTDDSRRPDGMTLTASEGGKTLVWDATVTDSLAPSMVSHGATQAGYAVSHAERNKCRKYAHIGDSMDFRPFAFETLGGPGKITEGVITKICKCLRLATRDPRAGDFFWQRLSLDMPQRCLAPCPGDLHHAWA

SEQ ID NO: 32585 - protein, 968 aa, Dermanyssus gallinae
MLIMPDNTLSSQDPAVPSSTSASHKSDCPICRKTFTSRGLRRHINSMHPGSNAYRQPATEDTRVQLSYMTSHIQFVFKNVRMIRIIPKTARRIVLECLVKVVNDVVTYNHASAWLSLLSFGPVILRLPNVKNESCSLADIIRSNLRDFENGLRLDGLAGRVGHQKHRKIGTSEEDLKRRVVAKLTDGDVSGAARLISSCDTFGVESDHVEALRDKHPCAPTDLRWTDPPAEASPAESFHVTREDIYRAVGSFPRSSAAGLDFIRPRLLQDLLSRAMGKRAEALADALAKLIEILLRGEPPRDLIPIIFGARLFALKKKDGTTRPIACSSTLRRIAAKIACWKNSSQIEEAIGDHQLGFAARSGTEVAIHAARAYLESRSEDIVMVKLDFQNAFNSVRRDHLLKAVVSHAPDLYHYFVQAYRNPTQLLLMDHVILSQSGLQQGDPLGPPLFCLAIKELIDSLESPFNVWYLDDGVLAGDPVTVARDIQKILDFATKSGLCLNPQKCELFVSGSSISDSSIRLITDLLPECIRTNKANLTLLGVPLLDDGKEEQLSGWVDKLKSSSSRLGLLGAHRGLFLLRSCFSTARVNHLLRGIDLTQDINILEQLNTHTLNSLTSLLNLSLPETARRQALLPVAKGGLGIPDAVLVAGPAVVASMSSTWHRASKILDFPAVERLRCLLEDSKECLLARTGAPPPEEPTSQASWTAPLEDIQLANLFNSTEDEVEKARLRAVSSSGAGAWLNALPSAPVGTLLDDFVVRICVGLRLGVPLVEEHVCSCGEKVSPLGHHGLSCIRSLGRRTRHAALNDTLARALRSSGYPCVLEPAGLYTDDSRRPDGMTLTAFEGGKTLVWDATVTDSLAPSMVSHGATQAGYAVSHAERNKCRKYAHIGDSMDFRPFAFETLGGPGKITEGVITKICKCLRLATGDPRAGDFFRQRLSLDIQRGNATAVLGTLSRWSTPGLDLGLM

SEQ ID NO: 32586 - protein, 918 aa, Dermanyssus gallinae
MLIMPDNTLSSQDPAVTSSSSASHKSDCPICRKTFTSRGLRRHINSMHPGSNAYRQPATEDTRAQLPYMTSHIQFVFKNVRMIRIIPKTARRFVLECLVKVANDVVTYNHNSAWLSLLSFGPVILRLPNVKNESCSLADIIRSNLRDFENGLRLDGLAGQVGHQKHRKIGTSEEDLKRRVVAKLTDGDVSGAARLISSCDTFGAESDHVEALRDKHPCAPTDLRWTDPPAESSPAESFHVSREDIYRAVGSFSRSSAAGLDFIRPRLLQDLLSRAMGERAEALADALAKLIEILLRGEPPRDLIPIIFGARLFALKKKDGTTRPIACSSTLRRIAAKIACWKNSSQIEEAIGDHRLGFAARSGTEVAIHAARAYLESRSEDIVMVKLDFQNAFNNVRRDHLLKAVVSHAPDLYHYFAQAYRNPTQLLLMDHVILSQSGLQQGDPLGPPLFCLAIKELIDSLESPFNVWHLDDGVLAGDPVIVARDIRKILDFATKSGLCLNPQKCKLFVSGSSISDSSIRPITDLLPECIRTNRANLTLLGVPPLDDGKEEQLSGWVDKLKSSSSRLGLLGAHRGLFLLRSCFSTARVNHLLRGIDLTQDLNILEQLNTHTLNSLSSLLNLSLPESARRQALLPVEKGGLGIPDAVLVAGPAVVASMSSTWHRASKILDFPAVGRLRSLLEDSKECLLTRTGAPPPEEPTSQASWTAPLENIQLANLFNSTEDEVEKARLRAVSSSGAGAWLNALPSAPVGTLLDDFVVRICVGLRLGVPLVEEHECSCGEKVSPLGHHGLSCIRSLGRRTRHAALNDTLARALRSSGYPCVLEPAGLYTDDSRRPDGMTLTAFEGGKTLVWDATVTDSLAPSMVSHGATQAGYAVSHAERNKCRKYAHIGDSMDFRPFAFETLGGPGKITEGVITKI

SEQ ID NO: 32587 - protein, 970 aa, Dermanyssus gallinae
MLIMPDNTLSSQDPAVPSSTSASHKSDCPICRKTFTSRGLRRHINSMHPGSNAYRQPATEDTRVQLSYMTSHIQFVFKNVRMIRIIPKTARRIVLECLVKVVNDVVTYNHASAWLSLLSFGPVILRLPNVKNESCSMADIIRSNLRDFENGLRLDGLAGRVGHQKHRKIGTSEEDLKRRVVAKLTDGDVSGAARLISSCDTFGVESDHVEALRDKHPCAPTDLRWTDPPAEASPAESFHVTREDIYRAVGSFPRSSAAGLDFIRPRLLQDLLSRAMGKRAEALADALAKLIEILLRGEPPRDLIPIIFGARLFALKKKDGTTRPIACSSTLRRIAAKIACWKNSSQIEEAIGDHQLGFAARSGTEVAIHAARAYLESRSEDIVMVKLDFQNAFNSVRRDHLLKAVVSHAPDLYPYFVQAYRNPTQLLLMDHVILSQSGLQQGDPLGPPLFCLAIKELIDSLESPFNVWYLDDGVLAGDPVTVARDIQKILDFATKSGLCLNPQKCELFVSGSSISDSSIRLITDLLPECIRTNKANLTLLGVPLLDDGKEEQLSGWVDKLKSSSSRLGLLGAHRGLFLLRSCFSTARVNHLLRGIDLTQDINILEQLNTHTLNSLTSLLNLSLPETARRQALLPVAKGGLGIPDAVLVAGPAVVASMSSTWHRASKILDFPAVERLRCLLEDSKECLLARTGAPPPEEPTSQASWTAPLEDIQLANLFNSTEDEVEKARLRAVSSSGASAWLNALPSAPVGTLLDDFVVRICVGLRLGVPLVEEHVCSCGEKVSPLGHHGLSCIRSLGRRTRHAALNDTLARALRSSGYPCVLEPAGLYTDDSRRPDGMTLTAFEGGKTLVWDATVTDSLAPSMVSHGATQAGYAVSHAERNKCRKYAHIGDSMDFRPFAFETLGGPGKITEGVITKICKCLRLASGDPRAGDFFRQRLSLDIQRGNATAVLGTLSRPGPRADVVCRHVR

SEQ ID NO: 32588 - protein, 968 aa, Dermanyssus gallinae
MLIMPDNTLSSQDPAVPSSSSASHKSDCQLCRKTFTSRGLRRHINSMHPGSNAYRQPATEDTRVQLSYMTSHIQFVFKNVRMIRIIPKTARRFVLECLVKVVNDVVTYNHNSAWLSLLSFGPVILRLPNVKNESCSLADIIRSNLRDFENGLRLDGLAGQVGHQKHRKIGTSEEDLKRRVVAKLTDGDVSGAARLISSCDTFGAESDHVEALRDKHPCAPTDLRWTDPPAESSPAESFHVSREDIYRAVGSFSRSSAAGLDFIRPRLLQDLLSRAMGKRAEALADALAKLIEILLRGEPPRDLIPIIFGARLFALKKKDGTTRPIACSSTLRRIAAKIACWKNSSQIEEAIGDHQLGFAVRSGTEVAIHAARAYLESRSEDIVMVKLDFQNAFNNVRRDHLLKAVVSHAPDLYHYFVQAYRNPTQLLLMDHVILSQSGLQQGDPLGPPLFCLAIKELIDSLESPFNVWYLDDGVLAGDPVIVARDIRKILDFATKSGLCLNPQKCELFVSGSSISDSSIRLITDLLPECIRTNRANLTLLGVPLLDDGKEEQLSGWVDKLKSSSSRLGVLGAHRGLFLLRSCFSTARVNHLLRGIDLTQDLNILEQLNTHTLNSLSSLLNLSLPETARRQALLPVAKGGLGIPDAVLVAGPAVVASMSSTWHRASKILDFPAVERLRSLLEDSKECLLARTGAPPPEEPTSQASWTAPLEDIQLANLFNSTEDEVEKARLRAVSSSGAGAWLNALPSAPVGTLLDDFVVRICVGLRLGVPLVEEHECSCGEKVSPLDHHGLSCIRSLGRRTRHAALNDTLARALRSFGYPCVLEPAGLYTDDSRRPDGMTLTAFEGGKTLVWDATVTDSLAPSMVSHGATQAGYAVSHAERNKCRKYAHIGDSMDFRPFAFETLGGPGKITEGVITKICKCLRLATGDPRAGDFFRQRLSLDIQRGNATAVLGTLSRWSTPGLDLGLM

SEQ ID NO: 32589 - protein, 968 aa, Dermanyssus gallinae
MLIMPDNTLSSQDPAVPSSTSASHKSDCPICRKTFTSRGLRRHINSMHPGSNAYRQPATEDTRVQLSYMTSHIQFVFKNVRMIRIIPKTARRIVLECLVKVVNDVVTYNHASAWLSLLSFGPVILRLPNVKNESCSLADIIRSNLRDFENGLRLDGLAGRVGHQKHRKIGTSEEDLKRRVVAKLTDGDVSGAARLISSCDTFGVESDHVEALRDKHPCAPTDLRWTDPPAEASPAESFHVTREDIYRAVGSFPRSSAAGLDFIRPRLLQDLLSRAMGKRAEALADALAKLIEILLRGEPPRDLIPIIFGARLFALKKKDGTTRPIACSSTLRRIAAKIACWKNSSQIEEAIGDHQLGFAARSGTEVAIHAARVYLESRSEDIVMVKLDFQNAFNSVRRDHLLKAVVSHAPDLYHYFVQAYRNPTQLLLMDHVILSQSGLQQGDPLGPPLFCLAIKELIDSLESPFNVWYLDDGVLAGDPVTVARDIQKILDFATKSGLCLNPQKCELFVSGSSISDSSIRLITDLLPECIRTNKANLTLLGVPLLDDGKEEQLSGWVDKLKSSSSRLGLLGAHRGLFLLRSCFSTARVNHLLRGIDLTQDINILEQLNTHTLNSLTSLLNLSLPETARRQALLPVAKGGLGIPDAVLVAGPAVVASMSSTWHRASKILDFPAVERLRCLLEDSKECLLARTGAPPPEEPTSQASWTAPLEDIQLANLFNSTEDEVEKARLRAVSSSGAGAWLNALPSAPVGTLLDDFVVRICVGLRLGVPLVEEHVCSCGEKVSPLGHHGLSCIRSLGRRTRHAALNDTLARALRSSGYPCVLEPAGLYTDDSRRPDGMTLTAFEGGKTLVWDATVTDSLAPSMVSHGATQAGYAVSHAERNKCRKYAHIGDSMDFRPFAFETLGGPGKITEGVITKICKCLRLATGDPRAGDFFRQRLSLDIQRGNATAVLGTLSRWSTPGLDLGLM

SEQ ID NO: 32590 - protein, 1198 aa, Chrysotoxum bicinctum
MDLNVNNNNLRVGIYTLTSVEPAATGAGSAPRGAESPAVENLTSMPQTRSRENEQLASQPVGSASMATQPLTTLAGLPRRRIKWNNDMNLFIMKTYYRITRCETSTSGYREQLYRMFVEKYPNLAHLTEQNIADRRATIVRTGLLARPLLESLLREVTIELSMDHQEDSNNVTIHANEVDSQNFDSDDRTPQLQNDDTNVQELRREFDSAIVNYTSIDPTLRPKLPKQKINEHLKSKVELMNNTILPNYVEEITTFKVLELFIYCSAYAIIKTNGGRIATVQRPQITKKKDIEPAWLRRLQNKVELLRMEAGILTSFTANTGRKLRSKALKVKRKYLIHAPYDESNRTITDALDTVKQRIRVYAKRLRRYKKSKKRKDDNQLFNNSQRQFYNKCKGKSGDIKYLPQKEELENFWSGIWSKSTQHNASSSLLKQNIATTADISPMENCNISADDFHTVLKRLHNWKAAGTDGLHNYWLKALVALHEVMRHQINGFIQDPTKMPRYLCEGVTYLIPKEDNTQDPANFRPITCLNTLYKLSTSCVAEIITKHCNNNNILAEQQKGSRKGSLGCKEQLTIDAVVTNQAITKQRNLYAAYIDYKKAFDMVPHSWLLSILKIYKINEHLVRFCETIMSKWCTKLRIGTITSRNITIARGIFQGDSLSPLWFCLALNPLSSLLNKSKHGFEIRNNVQNERLTHLMYMDDIKLYASTSSSLEQLLQIVEKFSIDIQMEFGIDKCKTVNIVRGKMCKGLEYTTSNNETIHSMEEGDVYKYLGMQQSKVTKHMAIKNSLVSSFQNRLEQIFRTALNSRNVTLAINSYAIPLVTYSAGIVKWSKTDLEDLERKIRTLMTKYRYHHPKASIERLTLPRSRGGRGIISIRDMVEKQNKHLFEYFFRKAESSSLHKAILNADQNFTPANMQGRSQRNDSANTIEDLYLNWKSKPLHGRHPNEIDGLNVDTEISNSWLRFGNLYPETEGFMIAIQDQVTPTRNYLKYIVNDQAIQTDNCRRCGAVHETIQHVLAGCTNIANISYKRRHDNVGKIVYKELLKKYGIAPTSATNIPYFSYTPESVRENRDYVIYWDRTVLTDTSIQFNRPDIVVYKKRQKQITFIDFAVVNNNNMDATYLTKIQKYMALGNELKELWRANSCTTIPIVLSTTGLVPKATISALKTLEIPTKLIYDMQKAVILDSCRIVREFLNIQ

SEQ ID NO: 32591 - protein, 1261 aa, Chrysotoxum bicinctum
MDIRTSFLTLRLYEYSFQVLFVSRLFFFFNNNNNNNVRGGLIHIPSNRKNPKNLCEYAEKITNMDLNVNNNNLRVGIYTLTSVEPAATGAGSAPRGAESPAVENLTSMPQTRSRENEQLASQPVGSASMVTQPLTTLAGLPRRRIKWNNDMNLFIMKTYYRITRCETSTSGYREQLYRMFVEKYPNLAHLTEQNIADRRATIVRTGLLARPLLESLLREVTIELSMDHQEDSNNVTIHANEVDSQNFDSDDRTPQLQNDDTNVQELRREFDSAIVNYTSIDPTLRPKLPKQKINEHLKSKVELMNNTILPNYVEEITTFKVLELFIYCSAYAIIKTNGGRIATVQRPQITKKKDIEPAWLRRLQNKVELLRMEAGILTSFTANTGRKLRSKALKVKRKYLIHAPYDESNRTITDALDTVKQRIRVYAKRLRRYKKSKKRKDDNQLFNNSQRQFYNKCKGKSGDIKYLPQKEDLENFWSGIWSKSTQHNASSSLLKQNIATTADISPMENCNISADDFHTVLNRLHNWKAAGTDGLHNYWLKALVALHEVMRHQINSFIQDPTKMPRYLCEGVTYLIPKEDNTQDPANFRPITCLNTLYKLSTSCVAEIITKHCNNNNILAEQQKGCRKGSLGCKEQLTIDAVVTNQAITKQRNLYAAYIDYKKAFDMVPHSWLLSILKIYKINEHLVRFCETIMSKWCTKLRIGTITSRNITIARGIFQGDSLSPLWFCLALNPLSSLLNKSKHGFEIRNNVQNERLTHLMYMDDIKLYASTSSSLEQLLQIVEKFSIDIQMEFGIDKCKTVNIVRGKMCKGLEYTTSNNETIHSMEEGDVYKYLGMQQSKVTKHMDIKNSLVSSFQNRLEQIFRTALNSRNVTLAINSYAIPLITYSAGIVKWSKTDLEDLERKIRTLMTKYRYHHPKASIERLTLPRSRGGRGIISIRDMVEKQNKHLFEYFFRKAESSSLHKAILNADQNFTPANMQGRSQRNDSANTIENLYLNWKSKPLHGRHPNEIDGPNVDTEISNSWLRFGNLYPETEGFMIAIQDQVTPTRNYLKYIVNDQAIQTDNCRRCGAVHETIQHVLAGCTNIANISYKRRHDNVGKIVYKELLKKYGIAPTSATNIPYFSYTPESVRENRDYVIYWDRTVLTDTSIQFNRPDIVVYKKRQKQITFIDFAVVNNNNMDATYLTKIQKYMALGNELKELWRANSCTTIPIVLSTTGLVPKATISALKTLEIPTKLIYDMQKAVILDSCRIVREFLNIQ

SEQ ID NO: 32592 - protein, 1290 aa, Cantharis rustica
MIRTPPKRKQNHTPDATPTPRKLPTRAQIIQAQNDRGNAIRAKMAQAKMEQPPPTSKATHTDPNSQCEPFSQDSENAHEEIITEAVIHTERPMAPPAAYTGPTTRRRASQQSEPDSSTEENCIEATNEDGRQTGGPPRELSAIDEEGSATTESYKIGGNTITFLHPPSEAFICHICPTIYKGAVWTSNKQSLLRHLKRAHEERFEHLRNACRYCTIDLGKKPSSHNCNPTRSPYTQEEYPYKCTQCAASFPTLLALRNHRRAEEEDAIKRLRNDIIPSPQTRRRRKRRRSSKDSIGSSISEDLTRTPERTTNPTENDLEVTQHTITSEEAPAADGVSLTSQSNSQSSASSTQTSTEMLSAHDINVTPETPTQGTPPTAEESGEDEGLLDAFKKPLDQIMETEPSEDAFNAFEKTMSQITESVQERFRLIRSPEERHSKRPEPNPDRTEASRIQRMYRWNRRRAIREIRKEEKIYCEIPKATVEGYLLQAWNSTGGLEDQPGLSEEDEIETRAARPVRTDPFTPEEVIKRLRRFENTAPGMDGITYKNWKEADPDANVLTRILNICLKHERVPRCWKESRTILIHKKGSKDDITNWRPIALNRTIYKLYAGCLQDRLTTWLGNEKILHEGQKGFTPNDGVIEHNYVLQHIINEARKNRTDAHIGLLDISTAFISISQEAVTEALDKNGAGQHLVNITRDLMAGNTTKIHLGQEETNSIPIRCGVKQGCPLSGTLFNMAINRALIRSQRVVGVKRVLAFADDITIAANTPDQLQESIHVLEEELTRVNLHLNPSKCKLLSIAKGQPTQEEITIGGHEVSSAGRFDVETFLGKPIGFRPVKTTEGLGDLADLGLDILKSNLAPWQRIDAMKTFVYPTFNFPMRLGRYEKKEWKQIDKVFRAEIKKTYNLPQEASNDYIYGPSSKNLMSIPVAAELSDIAQIDTAFKLLTSPDVNTRTMAREDLRKTVAWRAKTTPSDDLLGKFLSGSNEAPLSERGNEIANTWTRARMASARTDALWTWSNDEPTITIAGRIIDSTQRKRIMKTMRSANDEKRVKDLSTLKSQGKTLACFSQDKSSGHFIRDGRYTRFADWRFIHRARLNLVPLKANQIWNKERKTCRRCNFDQETLPHVLNHCMRNSTAMQRRHNSVVERIKAAAIGRRFEILGENQEVVQGSNLRPDLVIKKNARIYVVDISIPFENEKAAFTKAREAKMTKYEGLRNKLQEQHGVETSVEAVLVGALGSWDAKNDNFVRLLGARRYVTTMKRLCCSTVIKWSRDIYTEHLTGIRQYQEHN

SEQ ID NO: 32593 - protein, 1157 aa, Apoderus coryli
MPAEETGEPGGTTPRDGTAQQAMANGPRNNEPPPEHVTEDVAGNQNQPTEETTQNIGRMRFKWTDDMNEFIYRSYLIITEMETNNRPYSFELYDRVITRFPALRNKTRQNILDQRRQLFIRDRINPTRAEIIRTEVEIELGLRSNDSEEMPEPQGLQENEENQNAEEDTQFEENVIKFRGMDPSARPKIRRLKTHKNTFQIINRINNKIKDKVNEIHTLADAHDLLYAGAYTTLELNGQSINQRTNKNSNAHVADTKKPWQIRLEHKIHDLRTNIGQITQFLKTEKPTKKLEKKIKCVKMKSSNSEDKSLTDIMDTMKQKLTVYANRLKRYKESELRKHQNNLFHNNEKYFYRTLSSQQNQIFNEQPEADVAKKYWADIWENSRQHNRDAEWIKDESKYSEKIPIMKHNKITESDVKKAVNKTHNWKSPGPDSIHNFWLKKFNSLHAPLAAKLTEILKEPAKAPHFLTTGVTYLLPKTNPSACDPSKYRPITCLPTLYKLLTSILCDRIYDHLEQYKLIPEEQKGCRRGSRGCKEQLTIDTIITEEAKRRNRDLFVAYIDYKKAFDSVPHSLLIEMLEIYKINPLITELLKYIMPFWRSNLQIGQQNIGKVHIKRGIFQGDALSALWYCLTLAPLSRMIHNTKSGFELENGFSIDHLEYMDDIKLISGTKSGLDKILRATKKYSEDTCMDFGLDKCKISAMKKGVWQVHPGFHLDQNQKIDNLDQTETYKYLGLEQARGIRHNVMKNNLTKKLITRTKDILKTQLSAINKIKAINSYAIPTVTYSFGILKWTNTDLEDLNRKIRVSFTKCRARHPKSSVERFYIPRECGGRGVVDLKEAQQKQIDGLRKFFYEKAETSIYHKKIIKSDKDFTPLKLANKNYRPSEKVNSIEERILNWKSKELHGRYPALINNEEIDNKASNMWLKKGNIFAETEGFVMAIQDQVIPTLNYRKYIIKDPNIPNDKCRICFTKSETIEHIISGCSTLAPTEYLKRHDNVAKVIHQELRKNAKMLTDTLPYYQYKPEAVEESDTHKIYWNRTIRTDHTIESNRPDIVYQDKTTKHTYLIDVAIPAAHNTVEKQNEKIRKYLPLASEIKTLWKQEKVIVIPIIIGATGEIPKKLHKYLSDLNLPSTLFITLQKIAILGTCHIARKVLNTGT

SEQ ID NO: 32594 - protein, 1157 aa, Apoderus coryli
MPAEETGEPGGTTPRDGTAQQAMANGPRNNEPPPEHVTEDVAGNQNQPTEETTQNIGRMRFKWTDDMNEFIYRSYLIITEMETNNRPYSFELYDRVITRFPALRNKTRQNILDQRRQLFIRDRINPTRAEIIRTEVEIELGLRSNDSEEMPEPPALQENEENQNAEEDTQFEENVIKFRGMDPSARPKIRRLKTHKNTFQIINRINNKIKDKVNEIHTLADAHDLLYAGAYTTLELNGQSINQRTNKNSNAHVADTKKPWQIRLEHKIHDLRTNIGQITQFLKTEKPTKKLEKKIKCVKMKSSNSEDKSLTDIMDTMKQKLTVYANRLKRYKESELRKHQNNLFHNNEKYFYRTLSSQQNQIFNEQPEADVAKKYWADIWENSRQHNRDAEWIKDESKYSEKIPIMKHNKITESDVKKAVNKTHNWKSPGPDSIHNFWLKKFNSLHAPLAAKLTEILKEPAKAPHFLTTGVTYLLPKTNPSACDPSKYRPITCLPTLYKLLTSILCDRIYDHLEQYKLIPEEQKGCRRGSRGCKEQLTIDTIITEEAKRRNRDLFVAYIDYKKAFDSVPHSLLIEMLEIYKINPLITELLKYIMPFWRSNLQIGQQNIGKVHIKRGIFQGDALSALWYCLTLAPLSRMIHNTKSGFELENGFSIDHLEYMDDIKLISGTKSGLDKILRATKKYSEDTCMDFGLDKCKISAMKKGVWQVHPGFHLDQNQKIDNLDQTETYKYLGLEQARGIRHNVMKNNLTKKLITRTKDILKTQLSAINKIKAINSYAIPTVTYSFGILKWTNTDLEDLNRKIRVSFTKCRARHPKSSVERFYIPRECGGRGVVDLKEAQQKQIDGLRKFFYEKAETSIYHKKIIKSDKDFTPLKLANKNYRPSEKVNSIEERILNWKSKELHGRYPALINNEEIDNKASNMWLKKGNIFAETEGFVMAIQDQVIPTLNYRKYIIKDPNIPNDKCRICFTKSETIEHIISGCSTLAPTEYLKRHDNVAKVIHQELRTNAKMLTDTLPYYQYKPEAVEESDTHKIYWNRTIRTDHTIESNRPDIVYQDKTTKHTYLIDVAIPAAHNTVEKQNEKIRKYLPLASEIKTLWKQEKVIVIPIIIGATGEIPKKLHKYLSDLNLPSTLFITLQKIAILGTCHIARKVLNTGT

SEQ ID NO: 32595 - protein, 1097 aa, Apoderus coryli
MLMNLETLFSDSKAKYTLMVKKKKKKKKKKKKKKKKKKKKKKKKNNNNKNILDQRRQLFIRDRINPTRAEIIRTEVEIELGLRSNDSEEMPEPQALQENQENQNVEEDTEFEENVIKFRGMDPSARPKIRRLKTHKNTFQIINRINNKIKDKVNEIHTLADAHDLLYAGAYTTLELNGQSINQRTNKNSNAHATDTKKPWQIRLEHKIHDLRTNIGQITQFLKTEKPTKKLEKKIKCVKMKSSNSEDKSLTDIMDTMKQKLTVYANRLKRYKESELRKHQNNLFHNNEKYFYRTLSSQQNQITKEQPEADVAKKYWADIWENPKQHNRDAEWIKDESKYSEKIPIMKHNKITESDVKKAVNKTHNWKSPGPDSIHNFWLKKFNSLHAPLAAKLTEILKEPSKAPHFLTTGVTYLLPKTNPSACDPSKYRPITCLPTLYKLLTSILCDRIYDHLEQYKLIPEEQKGCRRGSRGCKEQLTIDTIITEEAKRRNRDLFVAYIDYKKAFDSVPHSLLIEMLEIYKINPLITELLKYIMPFWRSNLQIGQQNIGTVHIKRGIFQGDALSALWHCLTLAPLSRMIHNTKSGFELENGFSIDHLEYMDDIKLISGTKSGLDKILRATKKYSDDTCMDFGLDKCKISAMKKGVWQVHPGFHLDQNQKIDNLDQTETYKYLGLEQARGIRHNVMKNNLTKKLITRTKDILKTQLSAINKIKAINSYAIPTVTYSFGILKWTNTDLEDLNRKIRVSFTKCRARHPKSSVERFYIPRECGGRGVVDLKDAQQKQIDGLRKFFYEKAETSIYHKKIIKSDKDFTPLKLANKKYQPIEKVNSIEEKILNWKSKELHGRYPALINNEEIDNKASNMWLKKGNIFAETEGFLMAIQDQVIPTLNYRKYIIKDPNIPNDKCRICFTKSETIEHIISGCSTLAPTEYLKRHDNVTKVIHQELRKNAKMLTDTLPYYQYKPEAVEESDTHKIYWNRTIRTDHTIESNRPDIVYQDKTTKHTYLIDVAIPAAHNTVEKQNEKIRKYLPLASEIKTLWKQEKVIVIPIIIGATGEIPKKLHKYLSDLNLPSTLFITLQKIAILGTCHIARKVLNTGT

SEQ ID NO: 32596 - protein, 1233 aa, Culicoides sonorensis
MLLIINGLISRNETTIARKSTKMSRNLRSNSNMRTPEEGAPTGAGPGTGDNATVRRLRSRRRLSPELQEITSQSTQQRSTTTSIAPPAESAVETSNQLQLTQAGLPRRRMKWTPIVNENIIRIFYTVTLLETQTIGYRQQLYEKFKEMYPEINVSEQRIADQLRAIRSLKLISDERMNNIKDEVRVHLQQTITQNNQSSHDNMNESNDSYMTADEGDTSTMAPSPSQELIEKLEFELEAALSQFGGLDPTCRPQLPKVYPSIKLNEIFKIFNTSILPTRVNILRDLFELNTLVYCVAVAIVRVLGLKLIEQTNHTRSRRMPSWEYRLEKKIEVIRKDIGRLTSYINGNQSRKVTRLVKSILARNKIHSRHNSINDNAESCLDTLKQKLSVYVTRISKYRLSNKRKSDNIRFNKTQKSFYRSLKNQNPVLNDDEQQPDINIFEEFWKQQLSTEEHYNEDSTWIFGEELKTQNIQPMTNTSFTISDVSMAMKKLHNFKSPGIDKIQNYWYKKLSCIYGKMAELFNQVLAHPSEFPHFLTAGITYLLPKDLQNITDPSKYRPITCLPTLYKIYTSCLTQKIYEHCNLNNIIAVEQNGCKKNSRGCKEQLIIDSVVCGQAYGKNRNLFTAYIDYKKAFDSVPHDWLIKIMKIYKIDSTIVSFLENVMKTWRTTMCVKTAKTSEISINRGIFQGDSLSPLWFCLAMNPLSNLLNSTNNGFNMRSERTTLSKITHLLYVDDLKLYASNEEQLNEMLNIVDTFSKDIKMTFGLDKCRTLKVLRGKLQDPTTTSVNEQEIQDMQNDELYKYLGMKQARRIDHTIIKQELTTEFKKRVNLLLKTGLNSKNMFRAINTFAIPVLTYSFGIIKWSKTDIENLERKVRTSLTHHRKHHPKSSIERISLPRSMGGRGLASLNKLNSDQIVGLREFFSNKSQTSTLHQNICQIDKYTPLHLSEQNYVVTYPNEQNLFDQWKSKALHGRHPSELTKNIVDIRASNNWLISGELFPETEGFFIAIQDQVIATRNYMKFIVKDPTIVNDKCRYGCQASENIQHITSGCQQLAATDYTDRHNNVCKIIHQELALNLKLLNNKRERYYEYQPMPVLQNSGFKLYWDRTILTDRSVQYNRPDVTLINKDSKEVFLIDVAIPNANNLSTKHAEKIEKYRPLIDIIKKQWKMKSVKVVPIVISSTGLIPKSLFDGLRILNLNKNIYKQLQKATIIATSTIVRKFLGMENIRYSNN

SEQ ID NO: 32597 - protein, 1221 aa, Culicoides sonorensis
MEHNMSRRINENSDMRWPEEGGPSGADPGGDDYASGRWLRSSRRLNRAQPEQPQLTEERNATTPIIPPAESAVEVQSQPTLTQAGLPRRRMKWSLTMNEDIMRIYYTITELESNTTGYRQQLHQKFCELYPELAINEQRIVDQLRSIRVRNAIPEERLRSIKEEVRQQLQQHQDQQPQQINDSDESDAYATAEEDIPETQQVQPSSQELIEKLTSEMMTALAEFEGTDPLNRMKIPKVYESYKLKEIFKIMNVTIMPSFIPQMNNLNDLHTYVYCAAVAIIRTLGLVLFENANTTNPRTTRIPAWELRLNRKIEDLRKNIGRLTQYVNGNRSRRVTRSAEMIIRRNQMHAQHNPLNVIAVNCLDTLKQKLSVYVTRISKYKLSNKRKKHNIMFKNAEKKFYRSLKNQNDATTPIQNYPEMNVVEEFWQNQLSTIKNYTHDNPWISTVEQHAENIEPMQQTTITISDVRASIKKLHNFKSPGVDHIQNYWYKKLTCLHQKIAELFSHALNHPEEFPEFLTMGITYLLPKDLQNLQDPAKYRPITCLPTLYKIYSSCLASKIYEHCDNNNIMADQQKGCRKNSRGCKEQLIIDSVVCGQAFANNRNIFTSYIDYKKAFDSVPHDWLVNVLKIYKVDPVMITFLESTMRTWRTKVCLNSLQSNVMHIRRGIFQGDSLSPLWFCLAMNPLSQLLNSTEFGFNIRSERRTLSKINHLLYVDDLKLYAANEEQLDAMLNIVDTFSRDIQMEFGLDKCRTLKIIRGKLEDTTPTLVGTQEIEAMKEGELYKYLGMKQARKIDHTCIKQEITSEFHQRLKLLLKSGLNGKNLFKAINTYAVPVLVYSFGIIKWSKSDLDNLERKVRTSLTKERKHHPKSSIERVSLPRYMGGRGLKNLHKMLSDQIQGLRNFFHQQAETSTLLRHICKADKYSPLQLSEENYNIVCMSDSERFEKWKQKVLHGRHPAETSKLTIDTKASNQWLMSGELFPETEGFMIAIQDQVIATKNYMKYIVKDPSVTNDRCRYGCNASETIQHITAACQHLASTDYTERHNNVSKIIHQELALKFHLLNQSRKPYYEYEPMPVLENAEFKLYWDRTILTSRTVLHNRPDITVVKKLTKEVFLIDIAIPNSNNLQIKHSEKIEKYRPLIDPIKRQWHMEHVKIIPIILSSTGVIPKNLFESLRLLELNKNIFKSLQKAAILATSTIVRKYLGISNIRYTTGNAANNS

SEQ ID NO: 32598 - protein, 1219 aa, Culicoides sonorensis
MRSTRKRNRPMRLPEEGAPSGAGPGTGDYATVQRLRSNSRRLSPELQEIPSQSTQERNATTSSVPPAESAVEANLQHQLTQAGLPRRRMKWTPTMNENIMRMYLEITNLESNVTGYRQQLHLKFSNMYPELTVTEQRIADQLRTIRVRNLITEERLNNIKAEVSQILQERTSEQEQQHHRISSDSEEYETADEGETQTDPQPPSPELMDRVNNEMSTALTEFDGTDPLSRPKLPKIYKSYRLAQIVKIINTSTLPSYLSRINNLQDLQTYVYCAAVTTVRCLGLELVHQQLLNYRPNARPKWEIRLTRKIDEIRKDIGRLTQFIGGNRSKKVVKKVQLIFKRNKIHAQHNPRNELAGQCLDTLKQKLSVYVTRLAKYKISNKRKKDNSSFSRKEKTFYRSLRQPMDEINDAREPDILEIEEFWKQQLSTSESFERNNSWVEQERLQASGIQPMERTTFTTDDVSIVIKNLANFKSPGLDQLQNFWYKQLTSLHGKMAELFNYLLDHPDEFPDFLTSGVTYLISKDIQNRHDPSKYRPITCLPGLYKIYTSCLTTKIYNHCEANNIMAVQQKGCKKGSRGCKEQLIVDSVVCGQAYANNRNLFAAYIDYKKAFDSVPHDWLIEILKIYKIDSYIVTSLKNIMKTWRTKMCINSLQTNTIKICKGIFQGDSLSPLWFCLAMNPLSNLLNKTDNGFNLRSERRTLSRVNHLLYVDDLKLYAANEEQLDLMLNTVSTFSNDIRMNFGLDKCRTLKVIRGKLQDTTTTNVNEQEIQVMQEGEVYKYLGIKQARRIEHTTIKQEISSEFYKRINMLLKTGLNSKNMFKAINTFAIPVLTYSFGIIKWSKTDIEGLERKIRTSLTKHRKHHPKSSIERMSLPRTMGGRGLLSLNRLLSRQIQSLRDYFFLQAQQSPQYQHVCEIDKYTPLQLSEEGYVISDISDNERFEKWKQKSLHGRYPAEITKGNVDTKASNHWLVSGHLFPETEGFLIAIQDQVIATRNYMKYIVKDPTILNDKCRYGCATSETIQHITSGCQHLASVEYTERHNSVAKILHREIVLQFKLSDQLQKPYFEYTPEPVMENNFYKLYWDRTILTARTVQFNRPDITLVNKGTKEVFLIDIAIPNNNNLQSKYSEKIEKYRPLVDPIKRQWRMNSVKIVPIIISSTGVIPKNLFDSLRQLNIKKDLYKQFQKATVLSTSTIVRKFLGLSSINYNSGTTTTLPTG

SEQ ID NO: 32599 - protein, 2120 aa, Caenorhabditis sp.
MAAAIPFTCGPESPTNTTWGVTWSARARRIMLEGTPNVINGIILHAADVLVVAPTGKTLGSVAPGATELIPVVQNVLLMDFLLAEDFHLEIFGSFFSWEEEVAVSTLKTLGYAAPVQKAPLVCTVPAEQVVQLGEVLDFVRRSSTRSPPMDLLRSCKGVWGLITQGIFEDLSICQIHNAHYPEDYLLPAVSIPTQHGTNGYLKDCYQYIMQKIEMVLQLAAAIPTHGPEMSSPLTWEEEKPHRIFGSGRMVATIPKTQGPELPASSTWGADSIVRRSGPTVIRGGARNFDNDMADALEVKSRTDTTITLIVDMPNRDMMLCPLCRTCRTERGIGAEALKYLKRHIKDEHNLNLIIQYKCNECGEYEPEGCTYGSRWIKSHAKKSHDMVLQEAVERETTRSKTADQLNQAAPSLSLSKRAPAPAAKAESKPLESFFQPKAAMKRARETADGTSSTDADPEIVISKCKTSPICSPPQKKTYAEASSPTPAPSLTTSYRTPASSPPTQNERSPAGQTTSCPNSPPTTSDTITIEDESYIKVISNRVNVWALIHETGEEAWIDDQVLMIYLSQYIKKSSRFGSVDPVYFDSCSAMELGDKISDKNRDAVLLPICSKSHWTLLIVGKSVARYYDPLRLSIPRKVMDILEYLKKPLVNFDAETPKQSDSWNCGIFVMLMGRSIITGKSLTQEDVNKELQTFRRKLLVNLEKSYEIFAERPHILRNQSPKPTNTITMPSPPATKTSKPILNEIEHTEKVLSAEGEEVVPGGTISTVKPQNSHVHPQKAAITNQSSGEEADNGENMEWRTVGVKRKRAVTNESPAAKKAPAQKIFVEPPTNPQPDHTEHIPKLLAMRIQPPLSKSAKKRSKKEGKLVRSALANGPKKGPSKASATKTPGTPTLLIEKVRSWFERRMTEYREEGGIFQRLEWITDLLTLATLKAKDGNSKAVDMILARHPPPLPEQGERSTQTSRVQEARRFNSRPEADASEPLRARYAKNRGKVFNELIKKDSPRCTIPIAEVEAHFINTSKAPEVADKELETVVSGLEKVDMDPSIERPMESNEVRKLLENLKDTAPGADGLKYSNLKWLDPEGKLLAQVFDECRRHKKVPGHWKEAETVLLPKDCSEEDRRRPENWRPIALMPTIYKAYTSIWTQRINAVPGTISSCQRGFQSVDGCHDSIAILRMCIDTATTLNRNMAVAWLDLTNAFGSVPHRLISRALEAFGFPESVVAIVEDLYVGATMRVKTAKETTDPIRILAGVKQGDPISPTLFNLCLEGVIRRHLSRNTAHNCIGTRMNCLAFADDLAVMADSPSDLQKLLTELDTDCRGVGLIFKPKKCATLTIEKGRTVHATIKFNHEKIRTLAQTDTYKYLGVATGAEGRISETEKLVESVKDIETLVCSDLAPAQKLDAIRTFILPRLTYMYRNSTPKLSEIREFENIVMKAVKMAHNIPIRGSPTEYIQIPVKNGGLGVMSPRLTCVTTYICSMMRRLWHGEEMVSNLYGKALARIAGHHLNLSTPASTQQQCEYLNAQRITKGGYNLFVRLNESLRTLTRNKDSPWYRMEFKPDGNGVAMEIQATETSKPVTFAKADSAKMHQRMTNMLRTALTQNFLKNKDVKSRVVQVLQQHPASNNFVKDGRLLSIACHKFIHRARLNLLSCNANTFDPQMPKGCRRCPAEFESPIHILQNCHYQMATGITFRHDQVLNMVLDQIEKGEQAGYNIKVDSEDGPSRLRPDIVMSNGFEVLIADVTIPYENGLEAMKNAWQLKVDKYQGLVEYHEAKGRKATVLPIVVGSLGTYWTPTSKSLEQLGIRNTQIRRLIPEMCRSTMEASKNIYWRHILGDRYKAADRMCWKQGVPGAVKLPEEQRVRRFVRRAEDQWEPENQIEQSEVEVKTVKLSKKEKLRRKKAAGGERRGLGGTEEEQSNQGGSAGRPRRRAEDEPLEESRSRGGRSRSRGGRSRSRGGRSRSRGGRSGSRGGRGQGGRSRSRGGRSGSRGATWKTPAMIRQGWESDGRRKSVSWDEEDGEDVRRRREVVESSAIERKEDECWRRAPVSQNWGRSEEDEEYRRRSLEIAELDRELAARREWMRRDEERLVQLRATMGSHRAAEEAVHGKHGRQSGGPRW

SEQ ID NO: 32600 - protein, 1013 aa, Ormyrus nitidulus
MTNSGRSSDRATPTQQAEPGTSRDDEEFVCRAPSCDRAFKTATGRGVHENRAHPTWYDEFKLQNTANVKDRWSEEEREMLARKEAEISLSATKVFMTQELLKTFDNRSLESIKGQRKSAKYKQRVLELIEELRQLPSSSDSSDDTGSEPDEDPFDQYFKDLGPINIENNAFNAQRLNEICYMATYKNKAFVLAEVAIYLKNLFHASPKGKCGSKQPSVPAKSKSRKARRRADYARVQDLWRKDPCNCGKRILDDQLQQEVALEKEVMEPFWRTVFTKKSDASPDLRAASSEVENLWNPITTKEIRTAYPPRSTAVGLDGLTARLLRSVPLPMMERIFNLILWCGSLPEHLCASRTVLIAKKKGANSPGDFRPITVSSVLVRTLHKILANRLKLIELDPRQRAFRETDGCADNTILLDMALKYHHKRNKKMFMAILDMAKAFDSVTFNALESTLKAKGIPSVMVKYIIDVYSKSKTRLQHGSWVSEDIHPTCGVKQGDPLSPILFNFLIDEMLKTLTPEIGVDIDGLKIDVLAFADDLVLMASTERGLQSLINQVSTYLKSIGLEANANKCATVAIKTIPKKKQTAVDARCKFKIEGVTMPALNRTDEWRYLGVQFNPEGRAKLDALAKLEDYLSKLTQAPLKPQQRLWITRVILLPRLYHQLVLGKVTSGYLRSIDRRLRHHVRMWLHLPHDVPNAYIHAPITEGGLGIPSIRWTAPALRVRRLEHLLKSAFLQGETAEEYINCEIHKSELQIKDETNNVLKSNKLINAFWAKQLHKSYDGAPLKESNKVRNQHQWIRDGTRFLSGKDFVNSCKARINALPCLSRTSRGRVRDRHCRGGCGRIETMNHILQHCHRTHASRIKRHDAILNYMSRHIKQLGYVVDKEPKIHTTEGLRKPDLVLTLGKTGVILDAQIVSDQRDLDLANRSKISYYQDNASLLSLVKSRYKVDTILTLAVTLNWRGVWSRASCSDLIDRGLIKTSDIKIISSRTIIGGIIGFHTFNCTTSVKQRRRT

SEQ ID NO: 32601 - protein, 907 aa, Sepia pharaonis
MKRIIYDVCFEWFGSVVEKKDKKEEKRPNRRQIQKGKLRSEQRSLKRRFKEAPNHERAGLQELMNDIRRKILVISRAENQRKRRKKKRQSRRSFLINPHAFTKKLFVEAKSGKLDIPQAELENHLKKTYSDNMRDIPIPLIKDLPRPQDPTVMFDHSGIKLSQVRDFVRKARAGSAPGMNGISYKLYKNCPCVLRKLTVLLQRVWKQNIVPQEWCLADGIWIPKEMDSKGISNFRPISLLNVEGKIFFGVLARRMTDFLIGNDYINTSVQKAGIPGFPGCLEHAQMIWNSILSAKKKKTELHVIWLDLANAYGSVPHQLIRMALDFFNFPGKIREIIMKYFDSAFMKFTVKNYTTKWQPLEIGIMMGCVIFPLLFVLAMELILRGTSTTAKGVMTEEQVVLPPSRAFMDDITILVSSKIAANNLLEKYHNLFIWARMNVKPKKSRSLSLVRGSIKEIHFKITDDTIPTVKEMPVKSLGRLYTIPLTDRHRGTEVHKSTLKGLISIDRTFLPGKMKALYYQPGLLPRLLWPLQMYEIALSRIERIEQVINKYLRKWLGVPRCFSKVGLYTNSGHLQLPIHSLLEEFKVGKVRLHMMMRDSADDFIRKAHPEIKSGTKWSAAEATQEAETSLRIRDIMGVIQKNRAGLGNTTHKYFSKENAKGKRRMVVEEIKIFEEEHRIGTAITQAKQCKWTTWNDIEPVKLSWNSLIAMEPLAISFLLRSTYDLLPNETNLKMWEYTDTDLCFSCQKDRGTLRHVLSACPQSLQMYTWRHNKVLEVIRDLIRTQCETANQQLVATKETKIEFHKEGECPAKKKQTAPNIKLLRGASDWKVLVDLMISLKFPIHIAQTDKRPDIVLWSDSKKTVFLIELTVPWEENRVEAHELKKNRYESLRAECMENGWTCHVMPY

SEQ ID NO: 32602 - protein, 1323 aa, Curetis bulis
METRSKRKLKGPLPGGNRRGTPGADAGCYSMRTVGDEELSRRAPVGHESEDMTADIIISTPSSPPSSTYSLFQSPSSSPHSFQNPSNSESCSPISYNVVQEASATQPEPIYDTNNATQITSTNNNNLRVAPVRINVTQRIKPHHTNNLPASTVLEEMLPATTLAGRKRQRMKWTDKINRDLLRCYYIVTNCETDLTAYRPLLHFQFSEMYPELKSLSEQRLADQVRVIHRNNRIPISERDIIKKEIQNSYNCIDHITQLGIQSDTQNSTEPHNCIDINDDSQVNISNTSQNYISMVTENNTFNDPLIQNDNITEEETEYFLKLQETFQINFNKFKNTDPLLRPSIPKLAMTQKYKQTLKMLNTIIKNSLENIVNPNLQNIHTVVYVAATTAITTHNTLKQKTDNNKTYNSRPPAWEYRLRNTVTDLRKRIGQLTQYIRGNLNEKKKKQINPENKPMEQIKEYLDTLKQTLQAKAKRLQRYKKSQRRRQDNIHFNNNQKLFYRNLADKNKNVKTVPRIEDLTQFWSNVWENTKDHNKDAPWILENLSEVSRIQEMTELTITIEDVLSAVQKLQNWKCPGPDKIQNFWWKAFKAVHNPLANIFNTFAQDPTQIPEFLTHGVTYLKPKDPNSIDPAKYRPITCLPTLYKILTSIISNKIYIHTKTNKILYEEQKGCYKGGRGCKEQLVIDSEIHTQARTKHHNLYYAYIDYQKAFDSVPHSWLIEVLRLYKIDPTIVLLLETLMKNWKTTLNIRSTTQNLHSHILHIKRGIFQGDALSPLWFCLAINPLSRLLNNNKHGYIIQKQPNIKITHLLYMDDIKLFAGTRNQLDNLLHITEQFSNDIGMEFGIDKCKINSIIKGKHITQQPYTLINQMDVIQSLDNEDSYKYLGFHQNYKINHTKVKQDLKNSYKQRLNTILKTELSARNKTKAINAFAIPILTYSFGIIKWSDTDLEALNTITRTACNKYGIHHTHSAVERFTLKRKQGGRGFIDIKNLCYRQIINLRTYFKSRIQDSPIHKAICSISKAGSVLFLSNNQRDYTTNITTDEEKTEKWKQKTLHGKFLKQLLQEDIDIDASNAWLTKGNIYAETEGFMVAIQDQNIKTRNYAKFILKEKLTTDRCRLCNKASETIEHITGGCSALANREYTYRHDNVSKQIHQLLALKYKLIDKYTPYYKYTPNNVLENKEFKLYWDRDIITDRTITSNRPDITLTIKATKTTYLIDISVPNTNNLKQKHNEKIQKYIQLADEIRQMWHQNTVRIIPVIISSTGVVPKNLHTALKSLQLHKNTFIQLQKSIIIDTCSIVRRFLNPSSLPLHSNEEEHHSG

SEQ ID NO: 32603 - protein, 1156 aa, Curetis bulis
MKWTDKINRDLLRCYYIVTNCETDLTAYRSLLHFQFSEIYPELRSLSEQRLADQVRVIHRNNRIPIGERDNIKKEVHNSYNYTDHITRSSPSLQNDTQNTAETHNYIDIHNDPQADILITQSQNYNNMAIENNTPTDPVIQNDYSTEEETDYFTKLQETFQINLEKFKNTGPLLRPSIPKLAMTQKYRQTLEMLNTIVKNVLQNIANPTLEYIHTLVYVAATTAIMTHNTVKQKPDNNKIYKSRQPSWEFRLKNTITDLRKRIGQLTQYIRGNLNEKKKKKINPVNKPVEQIKEDLDKLKQTLQAKAKRLQRYKKSQQRRQDNINFNNNQKLFYRKLADKNNNSKTVPRIEDLTQFWSNIWENTKDHNKDAPWISENQSEVSCIQEMTELTVTIEDVLSAVQRLQNWKCPGPDKIQNFWWKAFKAVHNPLCHIFTSFAQDPTQIPQFLTHGITYLKPKDTNSIDPSKYRPITCLPTLYKILTSIISNKIYTHITTNKILYEEQKGCYKGGRGCKEQLVIDSEIHTQARTKHHNLYYAYIDYQKAFDSVPHSWLIEVLRLYKIDPKIVLLLETLMQNWKTTLNIRSTTQNLHSQTLQIKRGIFQGDSLSPLWFCLAINPLSRLLNNNKNGYIIQKQPNIKITHLLYMDDIKLFAATRNQLDNLLYITELFSNDIGMEFGIDKCKINSIVKGKHITQQPYTLNHQMNAIQSLDTEDSYKYLGFHQNHKINHTKVKQDLKNTYKQRLHTILRTELSARNKTKAINTFAIPVLTYSFGIIKWSDTDLEALNTMTRTACNKFGIHHTHSAVERFTLKRKQGGRGFVDIKNLCYRQIINLRNYFKSRMQDSPIHKAICSISKSGSVLFLSNNQTDYTTNVATEEEKIEKWKQKTLHGKFPKQLSQEDIDIEASNAWLTKGNIYAETEGFMVAIQDQIIRTRNYAKFILKEKLTTDRCRLCNKASETIEHITGGCSALANREYTYRHDNVSKQIHQLLALKCKLINEYTPYYKYTPNNVLESKEFKLYWDRDIITDRTITSNRPDITLTIKAIKTTYLIDISVPNTNNLKQKHTEKVQKYIQLADEIKQMWHQNTVRIIPVIISSTGVVPKNLHTALKTLQLHKNTFIQLQKSIVIDTCSIVRRFLNPSSLPLHNNEEEHHSG

SEQ ID NO: 32604 - protein, 1340 aa, Curetis bulis
METRSKSKLKGPLPGGDRRGTPGADAGCLSMRTVGDAELSRRAPVGHVSEDTTADIIISTPSSPISSPYSLFQSPSSSLHSFENPTNSETSSQISFDAVQAASAVQSVPINDTIFDTYAACASFNVYQPEQAAVRNSQQVSNNHEPQARSVLQDMLPATTLAGKKRQRMKWTDQINKDLLRCYYLVTNCESDLTAYRPLLHLKFSEMYPELSTLTEQRLADQIRVIHRNNRITISDREIIKQSVANTNDIPIISDPNQLTFRNSQTQENTAYLSLNTMEGNTQQSEPIFSTLNTAETDSTHTHLNNTDTIDTNNILFNDETTIDDYELDYNILNETFQDNLNKYINTDPVTRPLIPKLSMNAKSRLIINKLNNIIHNTLQSIPNPTIEYIHTVVYVAAQTATILSKTPSENANINITQRRPKFSKPAWERRLENAISNLRKNIGRTTQYINGKLNRKKEKNINPNNKEIDIIKEDLDLMKQKLQAKAKRLQRYKKSRKRRQDNIQFNSNQKKFYRSLGTQQLIKTPPQIEDITSFWSNIWDEPVEHDKNAEWLLEEEVKTSGIQPMTELNIAIEDISETIKKLHNWKAPGPDKIQNFWWKAFKVVHKTLVEIFNSVIQEPTQVPAFLTMGVTYLKPKDEDTTNPAKYRPITCLPTLYKILTSVISNKIYTHINCNKIIAEEQKGCFKGGRGCKEQLIIDSEIHSQARKRHRNLYYAYIDYQKAFDSVPHSWLIKTLHLYKIDAKIIIFLENLMNNWKTTLSIKTETETISSNLVHIRRGIFQGDSLSPLWFCLAINPLSSLLNSSKNGYIIQKQPHVQITHLLYMDDIKLFAGTRQQLNNLLKITEEFSTSIHMNFGLNKCKIDSIVKGKHTSQEQYDLINNSNSIEGLGLNEYYKYLGFNQNYKIDHSNIKQDLKKTYIQRLNAVLRTELSARNKTKAINTYAIPVLTYSFGVIKWSDTDLEALNTTTRTACNRHGIHHIHSAVERFTLKRKQGGRGFIDIKNLYYRQVTNLRDYFERRCTDSIIHKAICSITPPENVLHLNNNQTDLTEKIVTDEKKIERWSKKVLHGKFYNQITQEHIDTEGSNAWLTKGNIYGETEGFMIAIQDQNIKTRNYAKFILKEKVDTDKCRLCHKASETIEHITGGCSTLANREYTQRHNNVAKQIHLKLAMKYKLIDEYIPYYKYTPKNVLENDQVKLYWDRDIITDRTILSNRPDITLTIKHTKTTYLIDISIPNTNNLKQKHTEKIQKYLYLADEIKQMWHQNIVRIVPVVLSSTGVIPKSLHNALKILDIHESTYISLQKSVILDTCSIVRRFLNPSTLPIHNTTEGQENNSTTTQ

SEQ ID NO: 32605 - protein, 1200 aa, Phareas burnsi
MLVSMGCSNHLTSGGLDICLLLFSLKKNSLIYLQKIKTYIIIIIINAPTAEHKSARKRWSEEMNRFIWRTYLQITQVETTNLRSYLNSLHQQFTVHFPAMQASRQRIGDQRRAIIRNKYLPKDVLDRIKSEVIDELAQSEKISQNTIAVNIQNYDTTQRQRMIWSDALNETLIRCFYEVTDLGNNLTTYRRNLRNRFVDIYPNLSHLSEQRISDQQRAIINNKYISDERIQQIKREAERKISNNNSVTTPSQPFITTARDSTLETQIEQAIEREGIEILQTHSDVSHTHYITIQHLNTQMQENIKVDFMTYLAKFTNSDPTNRPYIPKQKTSRKFAMIIAYINESILPELLKPEQDFITLQTFIYTGAFTATIYNGAKIGNNSKEHNRQKVKPAWQKRLENRIQMLRSDIGRLTQYIQGNKNKKIIKTVERIKNKHQTHAQYDNTNLELREFLDTLKQKLSVASSRLRRYLVCTDRKRQNKDFINNEKVFYRNLDITHLSTRNKTTDVPSTDALRNFWANIWQNPVEHNKSVDWINQNNKISSLHLGMEFKHIPMDTFIKVIKRTQNWRAPGTDNIHNFWYKKFTSTHSYIYNKLNSFIESLDTMPSYITQGVTYMLPKDLTDTTNPAKYRPITCLQTIYKILTACISEMIYEHLSKHDVLTEEQKGCRKNSQGCKEQLTIDAIAMNTAVTQKRDIYSMFIDYQKAYDTIPHSWLIEVLQLHKVHPTLISFLQKTMQDWQTTLKIKQNEQYIYTEPIHIRRGIFQGDALSPLWFCLALNPLSNLLKNTNLGFNFDRNSTEGALSHLMYMDDIKLFANTKDELFQLADITQKFSKDVRMEFGVDKCKILSVRKGKIENNSYTLETGEAIGPIEQYSSYKYLGFKQSRKIHHNIIKTELIKKFKHRLNLILNTHLNSKNTIKAINTYAISLLTYSFGIIHWSKSNLEKLQRIISAHLTKHRKHHPKACTQRLTLSRHEGGRGLIDIKNLHNAQISTLRHYFHSKSKHSSFHNYITEADNNLTPLNLKNRQTQTNEQIIDAQNKITTWAEKVLHGRHRAHICQKHIDKEKSNEWLKRGELFPETEGFMIAIQDETIVTRNYKKYVIKDPKQKTDLCRHCNAASETIQHITGGCRALAQTDYKHRHDQVAAIIHQQIAFRHKLIPEMIPYYKYKPNSVLEDINYKMYWDRTIMTDKTIHFNRPD

SEQ ID NO: 32606 - protein, 1276 aa, Cycloglypha thrasibulus
MCFITTIIIIIWSDEMNQFIWRTYLRITEIETTNLKSYLPILHEQFSKQFPDMQATRQRVGDQRRAIIKNKYLSDDILNQIKSDVDGELNKRTGLTYTNIQTNNPQNINPTHTYQSKKMSWTTTLNETLIRCFYEVTDLGKNLTSYRKKLRTKFVDLFPDLEYLSEQRISDQQRAILNNKYIPEEKLQQIKTEVQRYLLQNSPVGHAQSQRVDDGTFRNNAMVVGTEDDTASEELQLSQITTNKTQSRTESLDAQIREKIKTDFAANFEKFKNTDPTSREYLPKQKTSKYFTKIVDYIDKNILPEYLEDGQNFLTLQTIIYTAAFTAATFNGTKIGTKPVSTIQQKRKPAWQKRLESKIEMLRCDIGRLTQHINGNTNRKIVKYVDLIKIKYQIHTQYENNNTKLIDFLDTLKQKLNVASRRLKRYMACTARKNQNKEFLCNEKIFYRKLNENSDNSSNTHNTPTPNILREFWSNIWENRIEHNKTSKWIGQCEAEAQKINTTMEFTHIPLGTFVKVVKRTHNWKAPGSDHIHNFWYKKLKSTHIHVYNNLNTFLKSPDTIPNYITQGITLMLPKDLSETENPAKYRPITCLQAVYKILSGCVSEMMYAFLSKHNVMAEQQKGCRKDSHGCKEQLTIDSIVMNTAATKKRDLYTMFIDYQKAYDSVPHSWLIQILHIYKIHPTVISFLENTMQNWHTVLKIKNNSEFITTEPIYIKRGLFQGDTLSPLWFCLALNPLSELLNKSNLGFKLNDLDANVDNSEDTNLTHLMYMDDIKLFSDTKDHLFQLANITEEFSLDIHMNFGVDKCKILSVNKGKIVNDSYVLQSGEVIQPLDQHSTYKYLGFNQSRRIHHNSVKVDITRKFKYRLNIILKTYLNSKNTIKAINTYAIPILTYSFGIIRWTKTDLEKLQRTVSTHLTKHRKHHPKACTQRLTLPRNEGGRGLIDIKNLHNTQIGNLRSYFNTKSEHDKFYKYITDLDKNLTPLNLGNKQAQNNEHVTVTQDKIAAWSGKVLHGRHRAHLCQQHVDKDKSNEWLIKGELFPETEGFMIAIQDEIIVTRNYKKYIIKDPLQINDFCRHCNAAAETIQHITGGCKSLAQSDYKHRHDQVAAIIHQQLAYRYQLITKMVPYYKYTPESVLDDKNYKMYWDRTIITDKTIHFNRPDITIHDKLKKAVYLIDVAIPNSHNLQSTTSGKLSKYQDLAIELKTQWKVQIVHIIPIVLSATGIIPKTLIQSLKTLDMPSYTLSMLQKATILNTCRITRKFLTSSSVSSATVALE

SEQ ID NO: 32607 - protein, 1295 aa, Potamanaxas melicertes
MSRSSTITPMPVDVVQETEVNNFAPTISNKRARKRWSDEMNRYIWRTYLHITQIETTNLKSYLPVLHQKFSEQFPDMQATRQRVGDQRRAILKNKYLSEDILNQIKTEVDSELKESSATSSTNIQVNTTQITNTIQTYQASKMSWSSNLNETLIRCFYEVTDLGKNLTSYRRNLRTKFVELCPHLAHLSEQRISDQQRAILNNKYIAEEKLIQIRNEVQCCLLENSQVCDLHRRTIDDECLRDDARVTRTENNFVENEELQLTQTNISRTSTYTEHLNTQIQEKIKKDFAINFEKFKDTNPTSREYIPKQKTSKRFSKIVEYIDRNILPEYLKDDQDFVTLQTIIYTAAFTAATFNGTKIGTSNVSITQQKFKPTWQRRLENKIKMLRRDIGQLTQHINGNINRRILKLVDKIKRNHQTHTQYENTNTKLVDFLDTLKQKLNVASSRLKRYLKCTARKNQNKEFLCNEKRFYRNLNEHPDNNINTLNTPAPAEFREFWSKIWENPIEHNTTGRWIDQSNETAAGKLTSPMEFTNIPLDTFIKVVKRTQNWKVPGSDNIHNFWYKKLISTHIHVYNNLNKFLTSPHTMPNYISQGVTLMLPKDLNETNNPAKYRPITCLQTVYKILSGCMSEMMYEYLSKHNIMADQQKGCRKESYGCKEQLTIDSIVMNTAAKRKIDLHTMFIDYQKAFDSVPHSWLIQILRTYKIHPTLISFLENTMQKWRTVLKIRQDRHFTTTEPIYIKRGLFQGDALSPLWFCLALNPLSELLNNSNLGFTLDHNIDEGNLSHLMYMDDIKLFSDTKDNLFQLANITQEFSQDIRMEFGVDKCKILSIDKGKIINNSYLLQSGETIQPLDQHSAYKYLGFNQSRRIHHNSVKLDITQKFKYRLNLILKTYLNSKNTIKALNTYAIPILTYSFGIIRWNKTDLDKLQRMISTHLTKYRRHHPKACTQRLTLPRDEGGRGLIDIKNLHNTQIAKLRCYFHTKSDQVNFYKYISNLDNKLTPLNLNNKQTQSNEHITAMQHKIEAWSGKVLHGRHRAHLCQQHVDKEKSNEWLRRGELFPETEGFMIAIQDETIVTRNYRKYIIKDPLQTNDLCRHCNAAAETIQHITGGCRSLAQSDYKHRHDQVAAIIHQQLAYRYKLIPKMIPYYKYKPESVLDDKNYKIYWDRTIITDKTIHFNRPDITVHDKANKAVYLIDIAIPNSHNLQNTISGKLSKYQDLAIEIKTQWKVQIVHIVPIVLSSTGIIPKTLLQSLKTLDMPNFTLSMLQKATILNTCRITRIFLTSPSISATITLE

SEQ ID NO: 32608 - protein, 767 aa, Polygonus savigny
MEFNYISMNTLVNVIKRTHNWKAPGTDNIHNYWYKKFTKTHLYIHNILNTFLQFPEKMPQFITQGVTFLLPKDPSDTHNPAKYRPITCLQTIYKILTACISEVIHEHLSKHNILAEQQKGCRKNSKGCKEQLTIDAIAMNTAVTQKRNIYTMFIDYQKAYDSISHSWLIQTLEIYKIHPIIISFLQTSMRRWQTKLNIKQGMHFISTEPIQIQRGIFQGDALSPLWFCLALNPLSELLNNTKLGFNFNNDAVVGDLTHLMYMDDIKLFAKTKDDLFQLADITQQFSKDICMNFGIDKCKVLSVFKGKIENNSYLLENGVPIEPLDQFNTYKYLGFKQSKQINHKEIKSEIMKQFKHRLNILLKTCLNSKNTIKSINTYAIPVLTYSFGIIRWSKTDLKKLQSTINTHLTKYRKHHPKACTQRLTLPRREGGRGLIDIKNLHNTQITTLRCYFHSQSDHIPLHKHAVEADNRLTPLNLKNRLKQANEHITNVQEKIATWSGKILHGRHRSHLCQQYVDKEKSNEWLRKGELFPETEGFMVAIQDETIVTRNYKKYIMKDLQQVTDLCRHCSAVSETIQHITGGCKSLAQTDYRHRHDQVAAIIHQQLAYRHNLITHMIPYYKYKPDSVLDNHRYKIYWDRTIITDKTIYFNRPDITIHDKITKTAYLIDIAIPNSNNIQNTTSEKLSKYQDLAIELKTQWKLDTVKIIPIVLSSTGIIPKTLVQSLDTLKMPVYILHMIQKATILNTCRIVRKFLTSSTISAATLDIA

SEQ ID NO: 32609 - protein, 1383 aa, Haemactis sanguinalis
MTSTTKPRPQVLGEPSNLPDSDGSQVDTGFRGVYNLRARKPRQTTTACSKDSDLQCERKKSASLSSTESLLEPPILSSNPSSSSSSLYSSCLPCTIAPSSVYVVQQTNVNNVAPNTDSNRARKRWSNEMNSFIWRTYLQITQLETTNLRSYLQLLHEQFTNRFPEMSVTRQRVGDQRRAILRNRLLPEEKINQIRKEIKIELEKKGTLLLAPTSSTEKKIDEQKNKMSWSANLNETLLRCFYEVTDLGKNLTAYRRNLRNRFIEACPQLSHLSEQRISDQQRAIINNNYLTDKRMQDIRNEVESKRLTLINIQQQPLRMSILPDNISEKLVEEDVNGEQLESLESPSLVPHNEESLDIRIQIKLKEDFTHNFEKFKNTDPTSRPFILKQQSSKKLALIVSYIDKNIIPQYLQLDDSFETLQTIIYTAAYTASTCNRTKIGTNKNLDQQKTNRPHKPPWQIRLECKIQMFRRQIGHLSQYISGNKNKKITNTVKTITLKYQIHSHHENLNTKLTEYLDTLKQKLNVVSSRLKRYVTCTTRKRQNKQFLYSEKKFYKTLNINSENGIDFIEAPPPGELHSFWSKIWETPVQHNITAEWIDQHSKILETDTEMEFTNIPIDTFFTVMKRIHNWKTPGTDKIHNYWYKKLKSTHPYIHRKINTFVKSPDTMPSYITHGITFMIPKDLKDTKNPGKYRPITCLQSIYKIISSCISELFYDYLTKHHILAEQQKGCHKNSQGCKEQLLIDSTVINFAATQRKNIYTMFIDYQKAYDSVPHTWLLQILEIYKIHPTIVSFLKIAMDKWQTTLQIRQGSHSISTDPIRIRRGIFQGDALSPLWFCMALNPLSHLLNKANIGFQLDKNTEQETLTHLMYMDDIKLFSGNKDNLFKLANITQNFSNDIHMEFGVDKCKILSINKGKIVNNSYILNTGQSIEPIDQYSTYKYLGFNQSRRIHHNSVKTDIIHKFKHRLNIILKTQLNSKNTVKAINSYAIPILTYSFGIIRWSKTELKKLQRIINTNLTKYRTHHPKSCTQRLTLPRQEGGRGLIDIMNLHNTQITTLRSYFHSKAEHTNLHKLITETDNRLTPLNLKNKQKQFNEHITSNKEKIENWTKKTLHGRHRAFLCQKHVDKDLSNEWLKRGELFPETEGFMIAIQDETIVTKNYKKYIIKDPHQVSDLCRRCNSAAETIQHITGGCRLLAQSDYKHRHDQVAAIIHQQIAYRNHLISKMLPYYKYKPDSVLEDKNYKIYFDRTIITDKTIHYNRPDITFHDKENKTVFLIDVAIPNSHNLQSTISDKLTKYQDLAIELKTQWKAKTVHIIPIVLSSTGIIPKSLMQSLHALNMPSYTIQMLQKATILNTCRITRKFLSSSIVSSVTFITDHPVQALG

SEQ ID NO: 32610 - protein, 1390 aa, Charidia lucaria
MRSTTRPRPQVPGGSSNLPDSDGSQAGTGFRGVYNLRARKTRQTTMACLKDFDLQHEKVRSVSLSSTENSFETPVLSPSSSSLHSSPTSSAITPTSVYVVQETKVNNFAPNTDSSRARKRWSNEMNSFIWRTYLRITHLETTNLRSYLQLLHEQFAERFPEMSVTRQRVGDQRRAILRNRLLPEEKINQIRMEVRKELEENGPPLLATETSTEKNITRHKTKMTWSTYLNETLLRCFYEVTDLGKNLTAYRRNLRNRFIEVCPHLSHLSEQRISDQQRAIINNKYITDEKMQEIRNEIESKLLSQINLQQQPFRLNILSENISENFVEQDIDLEQLESLASSSLLPENRESLDTHTQKKLKEDFNNNFKKFENTDPTSRPFILKQQSSKKFALIVSYIDKNIIPQYLKLDDTFETLQTIIYTAAYTASIYNRTKTGTNKNLERRKTDQPRKPPWQMRLESKIQMFRRQIGHLSQYINGNINKKITSSVKKITLKYQIHSHHENMNTKLTEFLDTLKQKLNVASSRLKRYVTCTTRKSQNKQFLYNEKNFYKNLNINSQTDNNIIETPSPGELHNFWSSIWENPVQHNITAEWIDQHSEHFTKNTEMEFTNIPIDTFLKVIKRIHNWKTPGTDRIHSYWYKKLTSTHPHIHSKINTFLISPDTMPTYITHGVTFMIPKDLKDTKNPGKYRPITCLQSIYKILSSCISELFYDYLSKHHILAEQQKGCQKNSQGCKEQLIIDSATVNFAASQKKNIYTMFIDYQKAYDSVPHTWLLKILEIYKIHPTLISFLKSSMNNWQTTLQIRQGTHSISTDPIRIRRGIFQGDALSPLWFCMALNPLSHLLNKTNIGFQLEKNIEQETLTHLMYMDDIKLFSKSKDNLFKLADVTQKFSNDIHMEFGVDKCKILSINKGKIIKNSYILNTGQTIEPIDQHSTYKYLGFNQSRRIHHNTVKTDIIHKFKNRLNLILKTYLNSKNTIKAINSYAIPILTYSFGIIRWNKTDLQKLQRIINTNLTKYRKHHPKSCTQRLTLPRQEGGRGLIDIMNLHNTQTTTLRNYFHSKAEHTNLHKQIIEIDNRLTPLNLRNKQKQCNENITNNQEKIENWTKKALHGRHRAFLCQQHVNKELSNDWLKRGELFPETEGFMIAIQDETIVTKNYKKYIIKDPLQVSDLCRRCNAASETIQHITGGCRSLAQSDYKHRHDQVAAIIHQQIAYRNHLIPKMLPYYKYKPDSVLEDKNYKIYFDRTIITDKTIHFNRPDITVHDKENKTVFLIDVAIPNSHNLQSTISDKLTKYQDLAIELKSQWKVKTVHIIPIVLSSTGIIPKSLMQSLNMPSYTIRMLQRLLFSILLVESLEIFYLHTLFLQLLLVQINLFNRLVKSAIEFVIEEETS

SEQ ID NO: 32611 - protein, 1357 aa, Euriphellus phraxanor
MESTTRPRPQVPGGSSHCPDTDGSRASTGSRGVYNLRARKPRQTNNASLKDSDLLSNKEQTTSPSSTRSLFPSPSSSPNSFEYHTMNSRSSTVTPASMDVVQMTDVNNLAPTTDYKRARKRWSEEMNKFIWRTYLRITHIETTNFRSYLHSLHQQFTEHFPTMQATRQRIGDQRRAIIRNKLLSQEALTQIKIEVKEELEKLKTVAGTNIDTSAQQNTYKILQTSQRQRMSWTEEINETLIRCFYEVTDGGKNLTSYRRKLRNRFIEAYPQLANLTEQRISDQQRAILNNKYIADERLEQIRRQVESSQYSISENFYVQNLTEANKVYLHSNLPERQIDLQTEIEECELSQTPLIDNTELNVTNIHTQVLDFQMQEKIKIKFNNNFEIFKHTDPTTRPYIPKQRTSKRLAMIVAHINENILPDYLKIDQDFSTLHTIVYTGAFTAATCNGAKIGTNSEYKRQHITPRWQKRLEGKIQNLRADIGRLTQYINGNSNRRIAKTIEKIKKRYQIHARHENTNTKLIDFLDTLKQKLNVASKRLKRYLTCSDRKRQNKSFINNEKSFYRKLNSTHSNMNTVTEVPTADVLRQYWAKIWENPIEHNKTADWICQTNIMHIPNTDMEFEHIPMATLIKVIKHTHNWKAPGTDNIQNFWYKKFTSTHSHIYNHLNTFLKSPDKMPTFITQGVTFMLPKDPNDTSNPAKYRPITCLQTIYKILTACISDIVHEHLSKHNILAEEQKGCRKNSQGCKEQLTIDAIAMNTAVTQKRNIYTMFIDYQKAYDSIPHSWLIQILKIYKIHPKIITFLEISMQNWYTSLKIKQDQHLIITEPIQIRRGIFQGDALSPLWFCLALNPLSELLNNTNLGFKFDNNKVEEALTHLLYMDDIKLFAATKDELFQLADITQQFSKDVHMKFGVDKCKILSVNKGKIDNNSYILENDTPIEPLEQYSTYKYLGFEQSRQIHHKIVKTNIIKHFKHRLNLILKTSLNSKNTIKAINTYAIPILTYSFGIIRWSKTDLEKLQRTINTHLTKHRKHHPKACTQRLSLPRQEGGRGLIDIKNLHNTQISTLRRYFLSKSENTSLHKYATEADNKLTPLNLKNKQTQLNEHVTTVPEKIAAWSGKVLHGRHRAHMCQQHVDKEKSNEWLKRGELFPETEGFMIAIQDETIVTRNFKKYIMKDSKQTNDLCRHCNAASETIQHITGSCKSLAQTDYKHRHDQVAAIIHQQLAYRYHLIPKMIPYYKYKPESVLEDNKYKIYWDRTIITDKTIYFNRPDITIHDKIDKTAYLIDIAIPNSHNIQSTTSEKLSKYQDLAIELKTQWKLNTVKIIPIVLSSTGIIPKTLIQSLNTLNMPPYTLHML

SEQ ID NO: 32612 - protein, 844 aa, Camptopleura auxo
MTCTSRKYQNKEFLGNEKRFYRNLNEYQNSDNNTLSTPTPNTLREFWSSIWENKIEHNSTSKLISQIEAETQKPNTTMEFTHIPLDTFVKVVKRTQNWKAPGSDNIHNFWYKKLRSTHMHIYNHLNSFLNSPDTMPNYITQGVTLMLPKDLNETDNPAKYRPITCLQAVYKILSGCISEIMYEFLSKHSVMAEQQKGCRKDSHGCKEQLTIDSIVMNTAAKQKRDLYTMFIDYQKAYDSVPHSWLIQILHIYKIHPKLICFLENTMQKWQTALKIKQGTHFINTEPIYIKRGLFQGDTLSPLWFCLALNPLSELLNNSNLGFELNHNLEGGNLTHLMYMDDIKLFSNTKDNLFLLADITQEFSHDIRMEFGVDKCKTLSIHKGKVVNNSYMLQSGDIIQPLDQHSTYKHLGFNQSRRIHHNSVKLNITRKFKYRLNLILKTYLNSKNTIKAINTYAIPILTYSFGIIRWSKTDLDKLQRAINTHLTKHRKHHPKACTQRLTLPRNEGGRGIIDIKNLHNTQIFKLRSYFHKRSDQVTFYKHITDADKNLTPLNLNNKRTQNNEHVTDTHDKIALWSGKVLHGRHRAHLCQQHVDKEKSNEWLRRGELFPETEGFMIAIQDETIVTRNYKKYIIKDPLQINDLCRHCNAAAETIQHITGSCRSLAQSDYKHRHDQVAAIIHQQLAYRYQLIKQMVPYYKYKPESVLDSRTYKIYWDRTIITDKTIHFNRPDITVHDKLKKAVYLIDVAIPNSHNLQNTTSGKLSKYQDLAIELKTQWKVQIVHIVPIVLSSTGIIPKTLLQSLKTLDMPNYTLSMLQKATILNTCRITRKFLTSSSVSSAIIALE

SEQ ID NO: 32613 - protein, 1371 aa, Pyrrhopyge creona
MKSTTRPRPQVLGGSSNLPDSDGNRAGTGSRGVYNLRARKTRQTTKACLKDTDLQSDKEPSSSPSSTGSLFQTPVSSPNPFEMSPSSRSLTISPTSVDVVQETTVDIPAPTTDNKRVRKRWSDEMNRFIWRTYLQVTKIETTRLKSYLQILHDQFTEHFPDMQATRQRVGDQRRAIIRNRLLSHDILEQIKTEVRDQIENDDVVSLTSTPIKPTNNNTTNQITQSKMSWSDTLNETLIRCFYEVTDLGKNLTAYRSKLRNRFIKEYPQLSHLSEQRISDQQRAIINNKYIPAEKLHHIRTEVENDHINNYAQQCTLTDNHPHVDIYKTRNENERETEEYESSQTQFTPQRKIERLDIRIQEKLKADFATNFERFKNSNPISRPYIVKQKSSRKFAMIVAYINKNILPDYLKPPQTFITLQTIIYTAAYTAATGNGTKIGTSRGENRIKQKPGWQTRLEYKIQTLRCDIGRLTQYINGNRNKNIAKNVENIKIKYQIHTLHEDTNTKLTEFLDTLKQKLNVASSRLKRYLTCTKRKRQNNEFVNNEKQFYRNLNLQVHSNDKVTNKPTPTTVKEFWENIWENPVQHNKNASWLNRYSQTLDLIPEMEFTHIPLDTFLKVIKRIQNWKAPGTDNIHSFWYKKLTSTHPYLYKNLNTFLQSPHTMPSYVSQGITFLIPKDLKDTSNPSKYRPITCLQTIYKILTACISEVLYEHILKHNILAEQQKGCRKSSQGCKEQLTIDAIAMNSAATQKRNIYTMFIDYQKAYDSIPHSWLIDILELYKIHPTILFFLKETMKNWQTTLRIKHGMHLISTEPIQIQRGIFQGDALSPLWFCLALNPLSELLNSTKLGYRFHKDISEETLTHLMYMDDIKLFAHSKDDLFQLADITQEFSKDIHMDFGVDKCKILAVNKGKIEQSSYILETGVPIQPIDKFSAYKYLGFNQSRRIHHNSIKAEITKNFKHRLNLILKTHLNSKNTIKAINTYAIPILTYSFGIIRWNKTNLEKLQRIINTHLTKFRNHHPKASTQRLMLPRQEGGRGLIDIKNLHNTQIARLRQYFHTKSEHTKLHKHVTETDDRLTPLNLKNKQIQNNEHVISTQEKVATWAGKVLHGRHRAYLCQQHVDKDMSNEWLKRGELFPETEGFMVAIQDETVVTRNFRKHIIKDPLQVNDMCRHCNAAPETIQHITGACRSLAQSDYKHRHDQVAAIIHQQLAYRHQLIPKMIPYYKYKPDSVLENNKHKIYFDRTIITDKTIHYNRPDITVHDKVNKTVFLIDIAIPNSHNLQNTTSEKLSKYKDLAIELRTQWKVQTIHIIPIVLSSTGIIPKTLMQSLSTLKMPSYILHMIQKATILNTCRITRKFLTSSVISSATLAIE

SEQ ID NO: 32614 - protein, 1295 aa, Udranomia eurus
MRLRNRQIPQAGTRKGESRPEASASGSPAYSGGGNVSHMTTQSNTAVVGHPSSLISSDSSSPISLPISSAISSPFSSPISSPYLFEDPAISRSSTVTPVSVDVVRATEVESLAPTTGNKRARKRWSEEMNKFIWRTYLRVTQIETTNLKSYLDTLHQQFTIYFPEHSTTRQRIGDQRRAIIRNKLLSDDILDQIKTKVREELDKEIDTVIHTFNSSQISQRRRMNCTDELNQTLIGCFYEVAELGTNITAYRKKLRNRFIEVCPHLSHLSEQRISDQQRAILNNKYISEENLQHIKEQIKIQTQTQISDNTTFVANEEVNAAEGQEQELGNERFESSQTSVHTQRITTHINRVDLENELREKIKIDFVNNFEKFKNIDPTCRPYIPKQRTSRKLTTIVAYINKYIIPEFLNENHDYTALQTVIYTSAFTAATCNGTVIGIGKENNRQQYKPSWQKRLEDKILDLRSNIGRLTQYVKGNRNRRVIKTVENIKLKYQSHGRYDKNNTNINEYLDTLKQKLNVASSSLKRYLTCTDRKRQNTQFLNNEKSFYRNLKLSHSNISSKIIDTPLPDNLREFWANIWENPVEHSKIADWISQHRNRFTLDCEMIFTHIPMETLVKVIKRTHNWKAAGTDNIHNYWYNRFTNTHPYILQALNNFLLSPDTMPLYITQGVTYMLPKDPNFPNDPAKYQPITCLQSIYKILTACLSEVLYEYLTKFNILPEEQKGCRKNSQGCKEQLTIDAIAMNTAATQKRNIHTMFIDYQKAYDSIPHSWLIHILEIYKIHPTIITFLQKSMKNWKTKLKIRQGTLFKTTEPINIRRGIFQGDSLSPLWFCLALSPLSNLLNNTNLGFRFNENEQESRLTHLMYMDDIKLFAATRDELFQLADITQEFSKDVHMQFGIDKCKILSINKGKIENNIYTLESGAPIESLDQHSTYKYLGVLQSKQIHHTAFKKDATKQFKYRLNLILKSNLNSKNSIKAINTYAVPVLTYSFGIIRWSKTDLKNLQRTISTHLTKHRKHHPRACTQRLTLPRQKGGRGLIDIENLHNSQITTLRTYFHLKSEHSSIHKHATEADNKYTPLNLKNRQTQINERITTEQEKMATWSGKVLHGRHRAQLCQQHVDEDKSNEWLKKGELFPETEGFMLAIQDETIVTRNYRKHVIKDPKQVSDLCRHCNGRSETIQHIIGGCKSLAQTDYKHRHDQVAAIIHQQLAHRHHLIQKMIPYYKYKPDSVLENHEHKIYWDRTIITDKTIHFNRPDITYFDKMHKTVYLLDIAIPNSFNIQSTMSEKLSKYQE

SEQ ID NO: 32615 - protein, 1302 aa, Yanguna cosyra
MKSTTRPRPQVPGGSSNLPDTDGNWAGTGSRGVYNLRARKTRQTTKACLKDTDLQSDKESSSSPSSSTGSLFQTPVSSPNLSEMSLSSRSLTITPTSVDVVQETAVDIPAPTTDDNKRARKRWSEEMNRFIWRTYLQITKIETTRLKSYLQTLHEQFTLHFPDMKATRQRVGDQRRAIIRNRLLSHDIFEQIKTEVREQIENDDIVLLTSTPINPTKNDITNQVIQSKMSWSDALNETLIRCFYEVTDLGKNLTAYRKKLRNRFITEYPQLSHLSEQRISDQQRAIINNKYIPDEKLHHIRTEVENELINSRQCTLTDNHPPVDINKIHNVNEREGEEYESSQTQVIPQRKIERLDIRIQEKLKTDFATNFERFKNSNPISRPYIVKQKSSRKFGAIVAYIDKNILPDYLKPSQTFITLQSIIYTAAYTAATANGTKIGISRGENKIKQKPGWQIRLEHKIQMLRCHIGRFTQYINGNRNKNIVKTVENIKIKYQIHTQHENTNTKLTEFLDTLKQKLNVASSRLKRYLTCTERKRQNNDFINNEKQFYRNLNLQVHFKDKIADKPTPSTVKDFWANIWENPVQHNKTAAWLKRHSQALDPIPEMEFTHIPLDTFLKVIKRIQNWKAPGTDSIHSFWYKKLTSIHPYLYKHLNTFLQSPHTMPRYVSQGITFLIPKDLKDTNNPAKYRPITCLQTIYKILTACISEVLYEHVLKHNILAEQQKGCRKSSQGCKEQLTIDAIAMNSAATQKRNIYTMFIDYQKAYDSIPHSWLINILELYKIHPTILFFLKETMKNWQTTLRIKHGMHLISTEPIQIQRGIFQGDALSPLWFCLALNPLSELLNNTELGYRFHKDMSEETLTHLMYMDDIKLFAHSKDDLFQLADITQEFSKDIHMDFGVDKCKILAVYKGKIEQSSYILETGEPIQPIDKFSAYKYLGFNQSRRIHHNSIKSEITKNFKHRLNLILKTHLNSKNTIKAINTYAIPILTYSFGIIRWNKTDLDKLQRTINTHLTKFRNHHPKASTQRLILPRQEGGRGLIDIKNLHNTQITRLRQYFHTQSEQTKLHKHVTETDDKLTPLNLKNRQIQNNEHVISAQEKVATWAGKVLHGRHRAYLCQQHVDKDMSNEWLKRGELFPETEGFMVAIQDETVVTRNFRKHIIKDPLQVNDMCRHCNAAPETIQHITGACRSLAQSDYKHGHDQVAAIIHQQLAYRHQLIPKMIPYYKYKPDSVLENNNHKIYIDRTIITDNLFIHYNRPDIVVHDKVNKTVFLIDIAIPYSHDLQNTTSEKLSKYKDLAIALRT

SEQ ID NO: 32616 - protein, 1375 aa, Udranomia orcinus
MRLRSRQIPQAGTRKGESRPEPMASGSPSYSGGGNVSHMITQSNTAVVDHLLSHITSNSSLSISSPNLSPISSPLSSPISSLDRFEDPVISRSSTVTPVPVEVVQATEVESLAPTTGNKRARKRWSEEMNKFIWRTYLRITQIETTNLKSYLDSLYHQFTTHFPEHSSTRQRIGDQRRAIVRNKLLSQDILDQIKFEVIDELDKGINTNTYNSVLTLNNPQTSQRRRMNWNDDLNKTLIGCFYEVTDLGTNMTAYRKKLRNRFIEVCPHLAHLSEQRISDQQRAIINNKYISDENLQHIKEQIKTQAQISGNTLSVTVTANEELNVQVEQEQEIGNENSQTMPVHTQIQLTTHINREELETEIREKIKIDFTNNFEKFKDIDPTCRPYIPKQKTSRKLAMIVAHINKNIIPEFLLENQDYIVLQTIIYTGAYTAATCNGTVIGTSKENNRQQYKPSWQKRLEGKILDLRSNIGRLTQYVKGNRNKHIIKTVEKIKLKYHCHGKYDKNNTNANEYLDTLKQKLNVASSRLKRYLTCTDRKRQNTEFLNNEKSFYRNLKLSHSNNNTKSTETPPPGTLREFWANIWENPVEHNKTADWISQNCREFTPHSEMLFTHISIETLVKVIKRTHNWKAAGTDNIHNFWYKRFTSTHTYILQALNNFLLSPDTIPSYITQGVTYMLPKDPSLANDPAKYRPITCLQTIYKILTACISEVLYKHLTEYNVLAVEQKGCRKNSQGCKEQLTIDAIAMNTAATQKRDLHTMFIDYQKAYDSIPHSWLIHILEIYKIHPTIITFLQKSMQNWETRLKIRQGMVFNTTEPIHIRRGIFQGDSLSPLWFCLALNPLSNLLNNTNLGFQFNENNQESKLTHLMYMDDVKLFAATRDELFQLVDITQQFSKDIHMQFGVDKCKILSINKGIIENNTYILENGAPIESLDLHSTYKYLGVTQSKQIQHTTFKKDAIKQFKYRLNLILKSNLNSKNSIKAINTYAIPVLTYSFGIIRWSKTDLKNLQRTISTHLTKHRKHHPRSCIQRLTLSRQKGGRGLIDIENLHNSQITTLRTYFHSKSQHSSLHKHATEADNKLTPLNLKDRQTQINEHITTAQEKIVTWAGKVLHGRHRAQLCQQHVDEDKSNEWLKRGELFPETEGFLLAIQDETIVTRNYRKHIIKDPKLITDLCRHCNSSSETIQHIIGGCKTLAQTDYKHRHDQVAAIIHQQLAHRHHFIQKMTPYYKYKPDSVLENQEHKIYWDRTIITDKTIHFNRPDITYYNKIQKTVYIIDIAIPNSFNIQTTISEKLSKYQNLAIEIKNQWKVQTVHIVPIVLSSTGIIPKSLSENLTKLKMPTHTLQMLQKATILNTCRITRKFLTSSIISSSAIIL

SEQ ID NO: 32617 - protein, 1464 aa, Oechydrus chersis
MTNGALVHKKYAMRLRSRQIPQAGTREGESRPGPSGLGCPTYSGEGNVSHKTTQFPAVVVDRSRSNITSHPSSPDQSRSNITPHPSSPVSSTHSLFQSPNSSLYSPQQSSSRSTTVTPLSCDVQVGNDPKGVYNLRVRKTRQTTNACFKDSDLQNDMEQISRPLSSQSLSKSPVSPFVTSGYYTHPSSTNVASLPVDVVQPTKVDKFAPTTGEKRARKRWTNEMNIFIWRAYLRITKLETINLKSYLETLHLQFITHFPEIDATRQRIGDQRRAIIRNKLLSHNTLDLIKTEVMEELEKTTTSDTFKSNTTNNKTSMSHTSRSNKMRWSDALNETLIKCYYEVTNLGKDLTGYRKKLRNQFIEIYPHLADLSEQRISDQQRAILNNKYIPDEKLQNIKRLVETQIPSNIPISTYTQTQYERHVTPVSDDINVTQSQQEIDVVTLDTPQMQSTTYNQNRSRKTKECLEIEVQENIKKDFTSNFEKFKNIYPTSRPYIPKQKTSKRLAMIVEHINKNIIPDHLKEEEEDLTNLQTIIYTGAYTAATCNGTKIENNRENRQQFKPKWKKRLEDKILKLRADIGRLTQYIQGNRNKCIVRTVENIRIKYQIHAKHENNNITLKEFLDTLKQKLNVASSRLKRYTTCSDRKRQNKNFINNEKCFYRNLDNISFNTNTRTTKPTDIPTSDTMREFWANIWENPVEHNRKADWIKRGSEEVKLCNEMKEQQISINTLIKVIKHTHNWKAPGTDNIHNFWYKKFTSTHPYIHIIFNRFLEHPDTIPTYITQGVTFMLPKDPNNTNDPSKYRPITCLQTIYKILTACISEMLHEHLVTQNILAEQQKGCRKNSQGCKEQLVIDAIAMNTAAKNKKNIHTMFIDFQKAYDSIPHSWLIEVLKTYKVHPKIIFFLQVAMQNWHTTLKIRQGTHSISTEPIYIRRGIFQGDALSPLWFCLSINPLSNLLNNTNLGFRINNNKIGENLTHLMYMDDIKLYSDTTDGLFRLADVTQQFSKDICMEFGVDKCKILSISNGKIIDNTYTLENGTSIEPMNEYNTYKYLGIKQSRQIHHKTIKIELIKKFKHRLNLVLKSYLNSKNTIKAINTYAIPILTYSFGIIRWSKTDLKALQRTISSLLTKYLKHHPKSCSQRLILARQKGGRGLIDIVNLHNTQIIKLRNYFHSKAQDTSLHKSVTEADNRLTPLNLKNRQTQLNEHIISVQEKLETWAGKVLHGRHRAYMSQEHVDEQLSNEWLKRGELFPETEGFMVAIQDETIVTRNFKKHIIKDPNIITDTCRHCNAASETIQHITGGCKAIAQTDYKHRHDQVAAIIHQQLAYRYNLIENMIQYYKYKPDSVLENRNCRIYWDRTIMTDKTIYFNRPDITLHDKTNKTVYLIDVAIPNSHNIQNTISDKLGKYQDLAIEIKRQWNVNTVNIIPIVLSSTGIIPKSLIQSLNTLKMPTYTLHMLQKATILN

SEQ ID NO: 32618 - protein, 1371 aa, Nosphistia zonara
MKSTTRPRPQVPGGSSNFPDSDGNRAGAGSRGVYNLRARVTRQTTKACLQDSDLPCDKEPSSSPSSIGSLFQTPVSSPNLFEMSPSSGTLTISPRTVDVVQETEVDIPAPTTGTKRARKRWSDEMNRFIWRTYLQITKIETTSLKSYLQILHQQFTERFPDMQATRQRVGDQRRAIIRNRLLSLDTLDQIKTEVREEIEKDNAVLLPSNPINPTKINNVNQVTQSKMSWSDSLNETLIRCFYEVTDLGKNLTAYRRNLRNRFIEEYPQLSHLSEQRISDQQRAIINNKYIPAEKLHHIRTEVENQLINNEAQQYILADRHSRVSIYKIHNENETERQEYEASQTQFTPHRKIDYLDVRIQEKLKADFAANLEKFKNSNPTARPYIVKQKSSRKFAMIVAYINKHILPDYLKPQQTFITLQTIIYTAAYTTAINNGTKIGTTRGEHRVKQKPGWQKRLEGKIQMLRCDIGRLTQYINGNRNKNIVKTVENIKIQYQTHTQHEDINTKMTEFLDTLKQKLNAASSRLKRYLTCTNRKRQNNEFVNNEKQFYRNLNLQVYPNNKTTDIPTPSKLKEYWANIWEKPVQHNKSAAWINQHTKALALIPEMELSHIPLDTFLKVIKRIQNWKAPGTDNIHNYWYKKLTSVHPYLHKNLNTFLQAPNTMPNYVSQGITFLIPKDLKDTNNPAKYRPITCLQTIYKILTACISEVFYEHISKHNILAEQQKGCRKSSQGCKEQLTIDAIAMNSAAIQKRNIYTMFIDYQKAYDSIPHSWLIDILEVYKIHPIILTFLKETMKNWQTTLRIKHGTHLISTEPIQIQRGIFQGDALSPLWFCLALNPLSELLNSTKLGFKFNKDMTEETLTHLMYMDDIKLFAHSKDDLFQLADITQNFSKDIHMDFGVDKCKILAVHKGKIEHNSYILETGEPIQPIDKFSTYKYLGFNQSRRIHHNSIKSDLTKKIRHRLNLILKTNLNSKNTIKAINTYAIPILTYSFGIIRWSKTDLEKIQRTINTHLTKFRNHHPKASTQRLTLPRQEGGRGLIDIKNLHNTQIATLRQYFHTKAEHTKLHKHVTEADNKLTPLNLKNKQIQSNEHIISAQEKVAIWTGKVLHGRHRAYLCQQHVDKEKSNEWLKRGELFPETEGFMVAIQDETIVTRNFRKHIIKDPLQINDMCRHCNAAPETIQHITGACRSLAQSDYKHRHDQVAAIIHQQLAYRHQLIPKMIPYYKYKPDSVLENNKQKIYFDRTIITDKTIHFNRPDITVHDKANKTVYLIDIAIPNSHNLQNTTSEKLSKYKDLAIELRTQWKVQTIHIIPIVLSSTGIIPKTLVQSLSTLKMPFYTLHMIQKATILNTCRITRKFLTSSVISSATLAIE

SEQ ID NO: 32619 - protein, 1371 aa, Pyrrhopyge sergius
MKSTTRPRPQVPGGSSNLPDSDGSRAGTGSRGVYNLRARKPRQTTKACLKDTDLQSDKEPSSSPSSTGSLFQTPVSSPNPFEISPSSRSITISPTSVNVVQETTVDIPAPTTDNKRARKRWSDEMNRFIWRTYLQVTKIETTRLKSYLQILHEQFTEHFPDMQATRQRVGDQRRAIIRNRLLSHDILEQIKTEVRDQLENDDVVSLTSTPIKPTNNNTTNQITQSKMSWSDTLNETLIRCFYEVTDLGKNLTAYRSKLRNRFIKECPQLSHLSEQRISDQQRAIINNKYISAEKLHHIRTAVENDHMNNYAQQCTLSDNHPHVDIYKTRNENERETEEYESSQTQFTPQRKIERLDIRIQEKLKTDFATNFERFKNSNPISRPYILKQKSSRKFAMIVAYINKNILPDYLKPPQTFITLQTIIYTAAYTAATGNGTKIGTSRGENRIKQKPGWQKRLEYKIQTLRCDIGRLTQYINGNRNKNIAKTVENIKIKYQIHTLHEDINTKLTEFLDTLKQKLNVASSRLKRYLTCTERKRQNNEFVNNEKQFYRNLNLQVHSNDKVTNKPTPTTVKEFWANIWENPVQHNKNASWLNRYSQTLDLIPEMEFTHIPLDTFLKVIKRIQNWKAPGTDNIHSFWYKKLTSTHPYLYKNLNSFLQSPHTMPSYVSQGITFLIPKDLKDTNNPSKYRPITCLQTIYKILTACISEVLYEHILKHNILAEQQKGCRKSSQGCKEQLTIDAIAMNSAATQKRNIYTMFIDYQKAYDSIPHSWLIDILELYKIHPTILFFLKETMKHWQTTLRIKHNMHLISTEPIQIQRGIFQGDALSPLWFCLALNPLSELLNSTKLGYRFHKDMSEETLTHLMYMDDIKLFAHSKDDLFQLADITQEFSKDIHMDFGVDKCKILAVNKGKIEQSSYILETGEPIQPIDKFSAYKYLGFNQSRRIHHNSIKAEITKNFKHRLNLILKTHLNSKNTIKAINTYAIPILTYSFGIIRWNKTNLEKLQRIINTHLTKFRNHHPKASTQRLMLPRQEGGRGLIDIKNLHNTQIARLRQYFHTKSEHTKLHKHVTETDDRLTPLNLKNKQIQNNEQVISTQEKVATWAGKVLHGRHRAYLCQQHVDKDMSNEWLKRGELFPETEGFMVAIQDETVVTRNFRKHIIKDPLQANDMCRHCNAAAETIQHITGACKSLAQSDYKHRHDQVAAIIHQQLAYRHQLIPKMIPYYKYKPDSVLENHNHKIYFDRTIITDKTIHYNRPDITVHDKVNKTVFLIDIAIPNSHNLQNTTSEKLSKYKDLAIELRTQWKVQTIHIIPIVLSSTGIIPKTLMQSLSTLKMPSYILHMIQKATILNTCRITRKFLTSSVISSATLVIE

SEQ ID NO: 32620 - protein, 1371 aa, Pyrrhopyge pelota
MKSTTRPRPQVPGGSSDLPDSDGSRAGTGSRGVYNLRARKTRQTTKACLKDTDLQSDKEPSSSPSSTGSLFQTPVSSPNPFEMSPSSRSLTISPTSVNVVQETTVDIPAPITDNKRARKRWSDEMNRFIWRTYLQVTKIETTRLKSYLQILHEQFTEHFPDMQATRQRVGDQRRAIIRNRLLSHDILEQIKTEVRDQLENDGVVSLTSTPIKPTNNNTTNQITQSKMSWSDTLNETLIRCFYEVTDLGKNLTAYRSKLRNRFIKKCPQLSHLSEQRISDQQRAIINNKYISAEKLHHIRTEVENDHMNNYAQQCTLSDNQPHVDIYKTRNEIERETEEYESSQTQFTPQRKIERLDIRIQEKLKTDFATNFERFKNSNPISRPYILKQKSSRKFAMIVAYINKNILPDYLKPPQTFITLQTIIYTAAYTAATGNGTKIGTSRGEKRIKQKPGWQKRLEYKIQTLRCDIGRLTQYINGNRNKNIAKTVENIKIKYQIHTLHEDTNTKLTEFLDTLKQKLNVASSRLKRYLTCTERKRQNNEFVNNEKQFYRNLNLQVHSNDKVTNKPTSTTVKEFWANIWENPVQHNKNASWLNRYSQTLDLIPEMEFTHIPLDTFLKVIKRIQNWKAPGTDNIHSFWYKKLTSTHPYLYKNLNTFLQSPHTMPSYVSQGITFLIPKDLKDTNNPSKYRPITCLQTIYKILTACISEVLYEHILKHNILAEQQKGCRKSSQGCKEQLTIDAIAMNSAATQKRNIYTMFIDYQKAYDSIPHSWLIDILELYKIHPTILFFLKETMKHWQTTLRIKHSMHLISTEPIQIQRGIFQGDALSPLWFCLALNPLSELLNSTKLGYRFHKDMPEETLTHLMYMDDIKLFAHSKDDLFQLADITQEFSKDIHMDFGVDKCKILAVNKGKIEQSSYILETGEPIQPIDKFSAYKYLGFNQSRRIDHNSIKAEITKNFKHRLNLILKTHLNSKNTIKAINTYAIPILTYSFGIIRWNKTNLEKLQRIINTHLTKFRNHHPKASTQRLMLPRQEGGRGLIDIKNLHNTQIARLRQYFHTKSENTKLHKHVTETDDRLTPLNLKNKQIQNNEHVISTQEKVATWAGKVLHGRHRAYLCQQHVDKDMSNEWLKRGELFPETEGFMVAIQDETIVTRNFRKHIIKDPLQVNDMCRHCNAAAETIQHITGACKSLAQSDYKHRHDQVAAIIHQQLAYRHQLIPKMIPYYKYKPDSVLENHNHKIYFDRTIITDKTIHYNRPDITVHDKVNKTVFLIDIAIPNSHNLQNTTSEKLSKYKDLAIELRTQWKVQTIHIIPIVLSSTGIIPKTLMQSLSTLKMPSYILHMIQKATILNTCRITRKFLTSSVISSATLAIE

SEQ ID NO: 32621 - protein, 1355 aa, Pyrrhopyge zenodorus
MKSTTRPRPQVPGGSSNLPDSDGSRAGTGSRGVYNLRARKTRQTTKACLKDTDLQSEYEPSSSPSSTGSLFQTPVSSPNTFEMSPSSRSLTISPTSVNVVQETTVDIPAPTTDNKRARKRWSDEMNRFIWRTYLQVTKIETTRLKSYLQILHEQFTKHFPDMQATRQRVGDQRRAIIRNRLLSHDILEQIKTEVRDQLENDDVVSLTSTPIKPTNNNTTNQITQSKMSWSDTLNETLIRCFYEVTDLGKNLTAYRSKLRNRFIKECPQLSHLSEQRISDQQRAIINNKYISAEKLHHIRTEVENDHMNNYAQQCTLSDNHPHVDIYKTRIENQRETEEYESSQTHFTPQRKIERLDIRIQEKLKTDFATNFERFKNSNPISRPYILKQKSSRKFAMIVAYINKNILPDYLKPPQTFITLQTIIYTAAYTAATGNGTKIGTSRGENRIKQKPGWQKRLEYKIQTLRCDIGRLTQYINGNRNKNIAKTVENIKIKYQIHTLHEDTNTKLTEFLDTLKQKLNVASSRLKRYLTCTERKRQNNEFVNNEKQFYRNLNLQVHSNDKVTNKPTPTTVKEFWANIWENPVQHNKNASWLNRYSQTLDLIPEMEFTHIPLDTFLKVIKRIQNWKAPGTDNIHSFWYKKLTSTHPYLYKNLNTFLQSPHTMPSYVSQGITFLIPKDLKDTNNPSKYRPITCLQTIYKILTACISEVLYEHILKHNILAEQQKGCRKSSQGCKEQLTIDAIAMNSAATQKRNIYTMFIDYQKAYDSIPHSWLIDILELYKIHPTILFFLKETMKHWQTTLRIKHSMHLISTEPIQIQRGIFQGDALSPLWFCLALNPLSELLNSTKLGYKFHKDMSEETLTHLMYMDDIKLFAHSKDDLFQLADITQEFSKDIRMDFGVDKCKILAVNKGKIEQSSYILETGEPIQPIDTFSAYKYLGFNQSRRIHHNSIKAEITKNFKHRLNLILKTHLNSKNTIKAINTYAIPILTYSFGIIRWNKTNLEKLQRIINTHLTKFRNHHPKASTQRLMLPRQEGGRGLIDIKNLHNTQIARLRQYFHTKSEHTKLHKHVTETDDRLTPLNLKNKQIQNNEHVISTQEKVATWAGKVLHGRHRAYLCQQHVDKDMSNEWLKRGELFPETEGFMVAIQDETVVTRNFRKHIIKDPLQVNDMCRHCNAAAETIQHITGACKSLAQSDYKHRHDQVAAIIHQQLAYRHQLIPKMIPYYKYKPDSVLENHNHKIYFDRTIITDKTIHYNRPDITVHDKVNKTVFLIDIAIPNSHNLQNTTSEKLSKYKDLAKELRTQWKEQTIHIIPIVLSSTRIIPKTLMQSLSTYIENAFLYTSHDTKSNYFEYLPYY

SEQ ID NO: 32622 - protein, 1371 aa, Pyrrhopyge papius
MKSTTRPRPQVPGGSSNLPDSDGSRAGTGSRGVYNLRARKTRQTTKACLKDTDLQSDKEPSSSPSSTGSLFQTPVSSPNPFEMSPSSRSLTISPTSVNVVQETTVDIPAPTTDNKRARKRWSDEMNRFIWRTYLQITKIETTRLKSYLQILHEQFTKHFPDMQATRQRVGDQRRAIIRNRLLSHDILEQIKTEVRDQLENDDVVSLTSTPIKPTNNNTTNQITQSKMSWSDTLNETLIRCFYEVTDLGKNLTAYRSKLRNRFIKECPQLSHLSEQRISDQQRAIINNKYISAEKLHHIRTEVENDHMNNYAQQCTLSDNQPHVDIYKTRIENERETEEYESSQTQFTPQRKIERLDTRIQEKLKTDFATNFERFKNSNPISRPYILKQKSSRKFAMIVAYINKNILPDYLKPPQTFITLQTIIYTAAYTAATGNGTKIGTSRGENRIKQKPGWQKRLEYKIQTLRCDIGRLTQYINGNRNKNIAKTVENIKIKYQIHTLHEDTNTKLTEFLDTLKQKLNVASSRLKRYLTCTERKRQNNEFVNNEKQFYRNLNLQVHSNDKVTNKPTPTTVKEFWANIWENPVQHNKNALWLNRYSQTLDLIPEMEFTHIPLDTFLKVIKRIQNWKAPGTDNIHSFWYKKLTSTHPYLYKNLNTFLQSPHTMPSYVSQGITFLIPKDLKDTNNPSKYRPITCLQTIYKILTACISEVLYEHILKHNILAEQQKGCRKSSQGCKEQLTIDAIAMNSAATQKRNIYTMFIDYQKAYDSIPHSWLIDILELYKIHPTILFFLKETMKHWQTTLRIKHSMHLISTEPIQIQRGIFQGDALSPLWFCLALNPLSELLNSTKLGYKFHKDMSEETLTHLMYMDDIKLFAHSKDDLFQLADITQEFSKDIHMDFGVDKCKILAVNKGKIEQSSYILETGEPIQPIDKFSAYKYLGFNQSRRIHHNSIKAEITKNFKHRLNSILKTHLNSKNTIKAINTYAIPILTYSFGIIRWNKTNLEKLQRIINTHLTKFRNHHPKASTQRLMLPRQEGGRGLIDIKNLHNTQIARLRQYFHTKSEHTKLHKHVTETDDRLTPLNLKNKQIQNNEHVISTQEKVATWAGKVLHGRHRAYLCQQHVDKDMSNEWLKRGELFPETEGFMVAIQDETVVTRNFRKHIIKDPLQVNDMCRHCNAAAETIQHITGACKSLAQSDYKHRHDQVAAIIHQQLAYRHQLIPKMIPYYKYKPDSVLENHNHKIYFDRTIITDKTIHYNRPDITVHDKVNKTVFLIDIAIPNSHNLQNATSEKLSKYKDLAIELRTQWKVQTIHIIPIVLSSTGIIPKTLMQSLSTLKMPSYILHMIQKATILNTCRITRKFLTSSVISSATLAIE

SEQ ID NO: 32623 - protein, 1277 aa, Apyrrothrix sp.
MKSTTRPRPQVPGGSSNCPDSDGSQAGTGSRGVYNLRARKTRQTTKACLKDSDLQHEKEPSSSPSSIGSLFQTPVSSPNLFERSSSSRTLTITPTSADVVQETEVDIPAPTTVNKRARKRWSDEMNRFIWRTYLQITKIETTRLKSYLQTLHQQFIDHFPNMQATRQRVGDQRRAIIRNRLLSQDILDQIKTEVKDEIENNNVVSLTSTLISPTNINNANQITQSKMSWSDTLNETLIRCFYEVTDLGKNFTAYRRKLRNRFIKEYPQLSHLSEQRISDQQRAIINNKYIPAEKLHHIRTEVENHLINNAAQQCSLTDGHPHVDINKTHNEHEREIQDYKSSQTQFTPQRKIERLDKGIQEKLKSDFANNFERFKNSNPISRPYIVRQKSSRKFAMIVAYIDKYILPDYLKPSQTFITLQTIIYTAAYTAATGNGTKIGTSRGEQRKKQKPGWQKRLEHKIQMLRCDIGRLTQYINGNRNKKIAKTVENIKIKNQVHTQHEGTNTKLKEFLDTLKQKLNVASSRLKRYLTCTDRKRQNNEFLHNEKQFYRKLNLQVPPHDKIADVPTPNTLKEFWANIWENPVEHNKTATWLNRQSEALRLMPEMEFTQIPLETFLKVIKRIQNWKAPGTDNIHSFWYKKLTSTHPYLYKSLNTFLQSPTTMPNYVSQGITFLIPKDLKDTNNPAKYRPITCLQTIYKIFTACISEVLYEHISQHNILAEQQKGCRKSSQGCKEQLTIDAIVMNSAATQKRNIYTMFIDYQKAYDSIPHSWLIQILELYKIHPTILTFLKETMKNWQTTLRIKQGTHLISTEPIKIQRGIFQGDALSPLWFCLALNPLSELLNNTNLGFRFHKDTSEETLTHLMYMDDIKLFAHNKDDLFKLADITQKFSIDIHMDFGVDKCKILGVYQGKIEPDSYILATGESIQPIDQLSTYKYLGFNQSRRIHHNSIKSEITNKFRHRLDLILKTHLNSKNTIKAINTYAIPILTYSFGIIRWNKTDLQKLQRTINTHLTKFRNHHPKASIHRLTLPRQEGGRGLIDIKNLHNTQIAKLRQYFHTKSEHTKLHKQVTEADNRLTPLNLKDKQIQSNEHIFSAQEKVATWAGKVLHGRHRAYLCQQHVDKEKSNEWLKRGELFPETEGFMVAIQDETIVTRNFKKHIIKDPLQVNDMCRHCNAAPETIQHITGACRSLAQSDYKHRHDQVAAIIHQQLAYRHQLIPKMIPYYKYKPDSVLENNNHKIYFDRTIITDKTIHFNRPDITVHDKVNKTVYVIDVAIPN

SEQ ID NO: 32624 - protein, 1371 aa, Mysoria barcastus
MKSTTRPRPQVPGGSSNFPDSDGSRAGAGSRGVYNLRVRKTRQTTKACSQDFDLHCNKEPSSSPSSTESLFQTPISSPNLFEISTSSTSSTITSKTADVVQETGVSVPAPTTVTKGARKRWSDEMNRFIWRTYLQITKIETTRLKSYLQTLHQQFTIHYPDMQATRQRVGDQRRAIIRNSLLSHDILDQIKTEVRNEIERGVVVSLPSDQISPPKNNKTNQGTQRKMKWCDTLNETLIRCFYEVTDLGNNLTAYRRNLRDRFIKEYPQLSHLSEQRISDQQRAIINNKYIPAEKLQHIRTEVENQLIYNETQNHILANRHPHSSITETHNENETEREEYESSQTPFTPQKIIGGLDMRTQEKLKADFANNFERFKNSNPISRPYIVKQKSSRKLAMIVAYINKYILPDYLKPQQTFITLQTIIYTAAYTAAIGNGTKIGTTGGVNRIKQRPGWQKRLEGRIQMLRCDIGRLTQYINGNRNKKIVKTVENIKIKYQIHTQHEDNNTKMIEFLDTLKQKLNVASSRLKRYLTCTDRKRQNNEFLNNEKQFYRNLNLQAYSNNKITDIPSPSKLKEYWANIWEKPVYHNKTATWLNQHTESLDLIPEMELSHIPWGTFLKVIKRIQNWKAPGTDNIHSYWYKKLTSVHPYLYENLNTFLQVPNTMPNYVSHGTTFLIPKDLKDTNNPAKYRPITCLQNIYKILTACISEVLYEHISKHNILAEQQKGCRKSSQGCKEQLTIDAITMNLAATQKRNIHTMFIDYQKAYDSIPHSWLIHILQLYKIHPTIVIFLKETMKNWQTTLRVKHGMHLISTEPIQIKRGIFQGDALSPLWFCLALNPLSELLNNTKLGFRFHKDLSEETLTHLMYMDDIKLFAHSKDDLFQLADIAQKFSKDVHMDFGVDKCKILAVHKGKIEHNSYLLETGALIQPIDKFSTYKYLGFNQSRRIHHNSIKSDLTKKFKHRLNLILKTYLNSKNTIKAINTYAIPVLTYSFGIIRWSKTDLEKLQRTINTHLTKFRNHHPKASIQRLTLPRREGGRGLIDIKNLHNAQIATLRQYFHTKSEHIKLHKHVTEADNRLTPLNLKNKQIQSNEHITPVQEKVATWAGKVLHGRHRAYLCQQHVDKEKSNEWLKRGELFPETEGFMVAIQDETVVTRNFKKHIIKDPLQINDMCRHCNAAPETIQHITGACRSLAQSDYKHRHDQVAAIIHQQLAYRHQLIKKMIPYYKYKPDSVLENNNYKMYFDRTIITDKTIHFNRPDITFHDKNSKTVYLIDIAIPNSHNLQNTISEKLSKYKDLAIELRTQWKVQTVHIIPIVLSSTGIIPKTLQQSLSTLKMPFYTLQMIQKATILNTCRITRKFLTSSIISSATLAIE

SEQ ID NO: 32625 - protein, 1371 aa, Pyrrhopyge telassa
MKSTTRPRPQVPGGSSNLPDSDGNRAGTGSRGVYNLRARKTRQTTKACLKDTDLQSDKEPSSSPSSTGSLFQTPVSSPNPFEMSPSSRSLTISPTSVDVVQETTVDIPVPTTDNKRVRKRWSDEMNRFIWRTYLQVTKIETTRLKSYLQILHDQFTEHFPDMQATRQRVGDQRRAIIRNRLLSHDILEQIKTEVRDQIENDDVVSLTSTPIKPTNNNTTNQITQSKMSWSDTLNETLIRCFYEVTDLGKNLTAYRSKLRNRFIKEYPQLSHLSEQRISDQQRAIINNKYIPAEKLHHIRTEVENDHINNYAQQCTLTDNHPHVDIYKTRNEKERETEEYESSQTQFTPQRKIERLDIRIQEKLKADFATNFERFKNSNPISRPYIVKQKSSRKFAMIVAYINKNILPDYLKPPQTFITLQTIIYTAAYTAATSNGTKIGTSRGENRIKQKPGWQTRLEYKIQTLRCDIGRLTQYINGNRNKNIAKNVENIKIKYQIHTLHEDTNTKLTEFLDTLKQKLNVASSRLKRYLTCTKRKRQNNEFVNNEKQFYRNLNLQVHSNDKVTNKPTPTTVKEFWENIWENPVQHNKNASWLNRYSQTLDLIPEMEFTHIPLDTFLKVINRIQNWKAPGTDNIHSFWYKKLTSTHPYLYKNLNTFLQSPHTMPSYVSQGITFLIPKDLKDTSNPSKYRPITCLQTIYKILTACISEVLYEHILKHNILAEQQKGCRKSSQGCKEQLTIDAIAMNSAATQKRNIYTMFIDYQKAYDSIPHSWLIDILELYKIHPTILFFLKETMKNWQTTLRIKHGMHLISTEPIQIQRGIFQGDALSPLWFCLALNPLSELLNSTKLGYRFHKDISEETLTHLMYMDDIKLFAHSKDDLFQLADITQEFSKDIHMDFGVDKCKILAVNKGKIEQSSYILETGVPIQPIDKFSAYKYLGFNQSRRIHHNSIKAEITKNFKHRLNLILKTHLNSKNTIKAINTYAIPILTYSFGIIRWNKTNLEKLQRIINTHLTKFRNHHPKASTQRLMLPRQEGGRGLIDIKNLHNTQIARLRQYFHTKSEHTKLHKHVTETDDRLTPLNLKNKQIQNNEHVISTQEKVATWAGKVLHGRHRAYLCQQHVDKDMSNEWLKRGELFPETEGFMVAIQDETVVTRNFRKHIIKDPLQVNDMCRHCNAAPETIQHITGACRSLAQSDYKHRHDQVAAIIHQQLAYRHQLIPKMIPYYKYKPDSVLENNKHKIYFDRTIITDKTIHYNRPDITVHDKVNKTVFRIDIAIPNSHNLQNTTSEKLSKYKDLAIELRTQWKVQTIHIIPIVLSSTGIIPKTLMQSLSTLKMPSYILHMIQKATILNTCRITRKFLTSSVISSATLAIE

SEQ ID NO: 32626 - protein, 1371 aa, Pyrrhopyge proculus
MKSTTRPRPQVPGGSSNLPDSDGSRAGTGSRGVYNLRARKPRQTTKACLKDTDLQSDKEPSSSPSSTGNLFQTPVSSPNPFEMSPSSRSLTISPTSVNVVQETTVDIPAPTTDNKRARKRWSDEMNKFIWRTYLQVTKIETTRLKSYLQILHEQFTEHFPDMQATRQRVGDQRRAIIRNRLLSHDILEQIKTEVRDQLENDDVVSLTSTPIKPTNNNTTNQITQSKMSWSDTLNETLIRCFYEVTDLGKNLTAYRSKLRNRFIKECPQLSHLSEQRISDQQRAIINNKYISAEKLHHIRTEVENDHKNNYAQQCTLSDNHPHVDIYKTSNENERETEEYESSQTQFTPQRKIERLDIRIQEKLKTDFATNFERFKNSNPISRPYILKQKSSRKFAMIVAYINKNILPDYLKPPQTFIALQTIIYTAAYTAATGNGTKIGTSRGENRIKQKPGWQKRLEYKIQTLRCDIGRLTQYINGNRNKNIAKTVENIKIKYQIHTLHEDTNTKLTEFLDTLKQKLNVASSRLKRYLTCTERKRQNNEFVNNEKQFYRNLNLQVHSNDKVTNKPTPTTVKEFWANIWENPVQHNKNSSWLNRYSQTLDLIPEMEFTHIPLDTFLKVIKRIQNWKAPGTDNIHSFWYKKLTSTHPYLYKNLNSFLQSPHTMPSYVSQGITFLIPKDLKDTNNPSKYRPITCLQTIYKILTACISEVLYEHILKHNILAEQQKGCRKSSQGCKEQLTIDAIAMNSAATQKRNIYTMFIDYQKAYDSIPHSWLIDILELYKIHPTILFFLKETMKHWQTTLRIKHNMHLISTEPIQIQRGIFQGDALSPLWFCLALNPLSELLNSTKLGYKFHKDMSEETLTHLMYMDDIKLFAHSKDDLFQLADITQEFSKDIRMDFGVDKCKILAVNKGKIEQSSYILETGEPIQPIDKFSAYKYLGFNQSRRIHHNSIKAEITKNFKHRLNLILKTHLNSKNTIKAINTYAIPILTYSFGIIRWNKTNLEKLQRIINTHLTKFRNHHPKASTQRLMLPRQEGGRGLIDIKNLHNTQIARLRQYFHTKSEHTKLHKHVTETDDRLTPLNLKTKQIQNNEQVISTQEKVATWAGKVLHGRHRAYLCQQHVDKDMSNEWLKRGELFPETEGFMVAIQDETVVTRNFRKHIIKDPLQVNDMCRHCNAAAETIQHITGACKSLAQSDYKHRHDQVAAIIHQQLAYRHQLIPKMIPYYKYKPDSVLENHNHKIYFDRTIITDKTIHYNRPDITVHDKVNKTVFLIDIAIPNSHNLQNTTSEKLSKYKDLAIELRTQWKVQTIHIIPIVLSSTGIIPKTLMQSLSTLKMPSYILHMIQKATILNTCRITRKFLTSSVISSATLAIE

SEQ ID NO: 32627 - protein, 1325 aa, Creonpyge creon
MKGTTRPRPQVPGGSSNLPDSDGSQAGTGSRGVYNLRARKPRQTTKACLKDSDLQCEKEPPSSPSFIGSLFQTPVSSPNPFEMSSSSRSLTITPTSVDVVQETEVDIPAPTTVNKRARKRWSDEMNRFIWRTYLQITKIETTRLKSYLQTLHQQFIDHFPNMQATRQRVGDQRRAIIRNGLLSHDILDQIKTEVKDEIEKNDVVSLTSTPRNPTNNNNANQIIQSKMSWSDTLNETLIRCFYEVTELGKNLTAYRRKLRNRFIKEYPQLSHLSEQRISDQQRAIINNKYIPAEKLHHIRTEVENHLINNDAQQYILTDRHPHVDINKTHNEHEGEIQEYESSQTQFTPQRKIERLDIGIQEKLKSDFATNIERFKNSNPISRPYIVKQKSSRKFAMIVAYIDKNILPDYLKPSQTFITLQTIIYTAAYTAATGNGTKIGTSRGEHRKKQKPGWQKRLEHKIQMLRCDIGRLTQYINGNRNKKIAKTVENIKIKNQIHTQHEGTNTKLTEFLDTLKQKLNVASSRLKRYLTCTDRKRQNNEFLNNEKQFYRNLNLQVPSHDKITHVPTPNTLKEFWANIWENPVQHNNNATWVSRHSEALGLIPEMVFTHIPLEIFLKVIKRIHNWKAPGTDNIHSFWYKKLTSTHPYLYKNLNTFLQSPNTMPNYVSQGITFLIPKDLKDTNNPAKYRPITCLQTIYKILTACISEVLYEHISKHNILAEQQKGCRKSSQGCKEQLTIDAIAMNSAATQKRNIYTMFIDYQKAYDSIPHSWLIQILELYKIHPTILIFLKETMKNWQTTLRIKQGTHLISTEPIKIQRGIFQGDALSPLWFCLALNPLSELLNNTNLGYRFHTDVPEETLTHLMYMDDIKLFAHNKDDLFQLADITQKFSKDIHMDFGVDKCKILAVYKGKIEHNSYILETGESIQPVDKFSTYKYLGFNQSRRIHHNSIKSEITNKFRHRLDLILKTHLNSKNTFKAINTYAIPILTYSFGIIRWNKTDLEKLQRTINTHLTKFRNHHPKASIQRLTLPRQEGGRGLIDIKNLHNTQIAILRQYFHTKSEHTKLHKHVTEADNRLTPLNLKNEQIQNNEHIFSAQEKVATWAGKVLHGRHRAYLCQQHVDKEKSNEWLKRGELFPETEGFMVAIQDETVVTRNFKKHIIKDPLQVNDMCRHCNAAPETIQHITGACRSLAQSDYKHRHDQVAAIIHQQLAYRHQLIPKMIPYYKYKPESVLENNNHKIYFDRTIITDKTIHFNRPDITVHDKVNKTVYVIDIAIPNSHNLQNTTSEKLSKYKDLAIELRTQWKVRTIHIIPIVLSSTGIIPKTL

SEQ ID NO: 32628 - protein, 1371 aa, Mysoria xanthippe
MKSTTRPRPQVPGGSSNSPDSDGSRAGAGSRGVYNLRARKTRQTTKACLQDFDLHCDKEPSSSPSSIGSLFQTPVSSPNLFEMSSSPTSRTITPRTVDVVQETGVDVPAPTIVTKRARKRWSDEMNRFIWRTYLQITKIETTRLNSYLQTLHQQFTEHFPDMQATRQRVGDQRRAIIRNRLLSHDILDQIKNEVKDEIEKGVVVSLPSDAINPPNNNRTNQGTQSKMKWCDSLNETLIRCFYEVTDLGKNLTAYRRNLRDRFIKEYPRLSHLSEQRISDQQRAIMNNKYISAEKLQHIRTEVENQLINNEAQQYILANRHPHININEIHSESETEREENELLPTQFTPQRIIEGLDMQTQEKLKTDFANNFERFKNSNPITRPYIIKQKSSRKLAMIVSYINKYILPDYLKPQQTFIALQTIIYTAAYTAAVGNGTRIGTTRGEHRVKQKQGWQKRLEGRIQMLRCDIGRLTQYINGNRNKNIVKTVENIKIKYQIHTQHEDINTKMTEFLDTLKQKLNVASSRLKRYLTCTDRKRQNNEFLNNEKQFYRNLNLQAYSNNKITDIPTPSKLKEYWANIWEKPVYHNRTATWINQHTESLDLKPEMELSHIPWDTFLKVIKRIQNWKAPGTDNIHNYWYKKLTSVHPYLYENLNTFLQVPNTMPNYVSQGITFLIPKDLKDTNNPAKYRPITCLQTIYKILTACISEILYEHISKHNILAEQQKGCRKSSQGCKEQLTIDAIAMNIAATQKRNIHTMFIDYQKAYDSIPHSWLIHILELYNIHPTIIIFLKETMKNWQTTLRIKHGTHLISTEPIQIQRGIFQGDALSPLWFCLALNPLSELLNNTKLGFRFHKDLSEETLTHLMYMDDIKLFAHSKDDLFELANIAQKFSKDVHMDFGVDKCKILSVHKGKIEHNSYLLETGALIQPIDKFSTYKYLGFNQSRRIHHNSIKSDITNKFKHRLNLILKTYLNSKNTIKAINTYAIPILTYSFGIIRWSKTDLDKLQRTINTHLTKFRNHHPKASIQRLTLPRREGGRGLIDIKNLHNTQIATLRQYFHTKSEHTKLHKNITEADNRLTPLNLKDNQIQSNEHIIPVQEKVATWAGKVLHGRHRAYLCQQHVDKEKSNEWLKRGELFPETEGFMVAIQDETVVTRNFKKHIIKDPLQINDLCRHCNAASETIQHITGACRSLAQSDYKHRHDQVAAIIHQQLAYRHQLIPKMTPYYKYKPDSVLENNKHKIYFDRTIITDKTIHFNRPDITVHDKDSKTVYLIDIAIPNTHNLQNTTSEKLSKYKDLAIELKTQWKVQTIHIIPIVLSSTGIIPKTLVQSLSTLKMPPYTLHMIQKATILNTCRITRKFLISSIISSATLAIE

SEQ ID NO: 32629 - protein, 1352 aa, Cephise aelius
MKRKTRPRPQVPGGPSHYPDSDGSRAGTGSRGVYNLRVRKPRQTTEAGSKDSDLQSDNVQPSSPSTISLFPSPTSSPNPFEYPTYSRSSTVTPESVNVVHMTEVDFLAPIIDCKRARKRWSEEMNKFIWRTYLRITQIETTKLKSYLQLLHQQFTEQFPNMQATRQRIGDQRRAIIRNKLLSDETLAQIKTEVEEELRKAEPPNEIKVTQTTGTSQSLQRQKMNWSDELNEILIRCFYEVTEIGTNFTVYRKKLRNRFIEVCPQLSHLSEQRISDQQRAILNNKYISVERLEQIKRQVEKCLPNKSANSYVQTQPDVTHLLTEREGFDLSQTQLIDYTHSDITSTYIQGLDREMKQKINTEFTNNLETFKDIEPTCRPYIPKQKTSKRLAMIVAHINENILPNHLNLDQDFNTLQSIIYSGAYTAATCNGTKINDTRDHRKQRPTPKWQKRLENKIRNLRSDIGRLTQYINGNTNRRVVKVVEKIKIKYQIHARYENTNTKLIEFLDTLKQKLKVTSSRLKRYLVCTDRKRQNKSFIHNEKSFYRNLKSTQSDTNTITEVPTADMLRQYWANIWENPVEHNKTADWIHQKNIRRTPSNEMEFNHIPMNTLIKVIKHTHNWKAPGSDNIHNYWYKKFTTTHLYIHNNLNTFLQFPDTMPRYVTHGITFMLPKDPSDTGNPAKYRPITCLQTIYKILTACISDMIHEHLSKHNILAEQQKGCRKGSKGCKEQLIIDAIAMNTAVTRKRNIYTMFIDYQKAYDSIPHSWLIQILQIYKIHPTITSFLETSMKKWQTTLRIKQDIHNISTEPIQIQRGIFQGDALSPIWFCLALNPLSELLNNTKLGFKFDNNVIEGRLTHLMYMDDIKLFAATKDDLFQLADITQQFSRDIGMKFGVDKCKVLSVNRGKIENNKYILENDTPIEPLDQYNTYKYLGFKQSKQIHHKVIKSEITKQFRHRLNLILKTCLNSKNTIKAINTYAIPILTYSFGIIRWSTTDLKRLQCTINTHLTKYRKHHPKACTQRLTLPRKEGGRGLIDIQNLHNTQVTALRSYFHSKSEHISLHKQATEADNRLTPLNLKNRQMQNNEHITNIQEKTAIWSGKVLHGRHRAQMCQQHVDKEMSNEWLRRGELFPETEGFMIAIQDETIVTRNFRKHVMKDPKQTTDLCRHCNAASETIQHITGGCKSLAQTDYKHRHDQVAAVIHQQLAYRNQLIPKMIPYYKYKPDSVLEDRKYTIYWDRTIITDKTIYYNRPDITIHDKINKTVYLIDVAIPNSHNIQSATSEKLSKYQDLAIELKTQWKVNIIKIIPIVLSSTGIIPKNLVQSLDTLNMPPYTLHMIQKATILSTCRITRNF

SEQ ID NO: 32630 - protein, 1371 aa, Metardaris cosinga
MKSTTRPRPQVPGGSSNSPDSDGSRAGAGSRGVYNLRARKTRQTTKACLQDFDLHCDKEPSSSPSSIGSLFQTPVSSPNLFEMSSSPTSRTITPRTVDVVQETGVDVPAPTIVTKRARKRWSDEMNRFIWRTYLQITKIETTRLNSYLQTLHQQFTEHFPDMQATRQRVGDQRRAIIRNRLLSHDILDQIKNEVKDEIEKGVVVSLPSNAINPPNNNRTNQGTQSKMKWCDSLNETLIRCFYEVTDLGKNLTAYRRNLRDRFIKEYPRLSHLSEQRISDQQRAIMNNKYISAEKLQHIRTEVENQLINNEAQQYILANRHPHININEIHSESETEREENEPLSTQFTPQRIIEGLDMQTQEKLKTDFANNFERFKNSNPITRPYIIKQKSSRKLAMIVSYINKYILPDYLKPQQTFIALQTIIYTAAYTAAVGNGTRIGTTRGEHRVKQKQGWQKRLEGRIQMLRCDIGRLTQYINGNRNKNIVKTVENIKIKYQIHTQHEDINTKMTEFLDTLKQKLNVASSRLKRYLTCTDRKRQNNEFLNNEKQFYRNLNLQAYSNNKITDIPTPSKLKEYWANIWEKPVYHNRTATWINQHTESLDLKPEMELSHIPWDTFLKVIKRIQNWKAPGTDNIHNYWYKKLTSVHPNLYENLNTFLQVPNTMPNYVSQGITFLIPKDLKDTNNPAKYRPITCLQTIYKILTACISEILYEHISKHNILAEQQKGCRKSSQGCKEQLTIDAIAMNIAATQKRNIHTMFIDYQKAYDSIPHSWLIHILELYNIHPTIIIFLKETMKNWQTTLRIKHGTDLISTEPIQIQRGIFQGDALSPLWFCLALNPLSELLNNTKLGFRFHKDLSEETLTHLMYMDDIKLFAHSKDDLFELANIAQKFSKDVHMDFGVDKCKILSVHKGKIEHNSYLLETGALIQPIDKFSTYKYLGFNQSRRIHHNSIKSDITNKFKRRLNLILKTYLNSKNTIKAINTYAIPILTYSFGIIRWSKTDLDKLQRTINTHLTKFRNHHPKASIQRLTLPRREGGRGLIDIKNLHNTQIATLRQYFHTKSEHTKLHKNITEADNRLTPLNLKDNQIQSNEHIIPVQEKVATWAGKVLHGRHRAYLCQQHVDKEKSNEWLKRGELFPETEGFMVAIQDETVVTRNFKKHIIKDPLQINDLCRHCNAASETIQHITGACRSLAQSDYKHRHDQVAAIIHQQLAYRHQLIPKMTPYYKYKPDSVLENNKHKIYFDRTIITDKTIHFNRPDITVPDKDSKTVYLIDIAIPNTHNLQNTTSEKLSKYKDLAIELKTQWKVQTIHIIPIVLSSTGIIPKTLVQSLSTLKMPPYTLHMIQKATILNTCRITRKFLTSSIISSATLSIE

SEQ ID NO: 32631 - protein, 1371 aa, Pyrrhopyge hadassa
MKSTTRPRPQVPGGSSNLPDSDGSRAGTGSRGVYNLRARKTRQTTKACLKDTDLQSDKEPSSSPSSTGSLFQTPVSSPNPFEISPSSRSLTISPTSVNVVQETTVDIPAPTTDNKRARKRWSDEMNRFIWRTYLQVTKIETTRLKSYLQILHEQFTEHFPDMQATRQRVGDQRRAIIRNRLLSHDILEQIKTEVRDQLENDDVVSLTSTPIKPINNNTTNQITQSKMSWSDTLNETLIRCFYEVTDLGKNLTAYRSKLRNRFIKECPQLSHLSEQRISDQQRAIINNKYISAEKLHHIRTEVENDHMNNYAQQCTLSDNHPHVDIYKTRNENERETEEYESSQTQFTPQRKIERLDIRIQEKLKTDFATNFERFKNSNPISRPYILKQKSSRKFAMIVAYINKNILPDYLKPPQTFITLQTIIYTAAYTAATGNGTKIGTSRGENRIKQKPGWQKRLEYKIQTLRCDIGRLTQYINGNRNKNIAKTVENIKIKYQIHTLHEHTNTKLTEFLDTLKQKLNVASSRLKRYLTCTERKRQNNEFVNNEKQFYRNLNLQVHSNDKVTNKPTPTTVKEFWANIWENPVQHNKNASWLNRYSQTLDLIPEMEFTHIPLDTFLKVIKRIQNWKAPGTDNIHSFWYKKLTSTHPYLYKNLNTFLQSPHTMPSYVSQGITFLIPKDLKDTNNPSKYRPITCLQTIYKILTACISEVLYEHILKHNILAEQQKGCRKSSQGCTEQLTIDAIAMNSAATQKRNIYTMFIDYQKAYDSIPHSWLIDILELYKIHPTILFFLKETMKHWQTTLRIKHNMHLISTEPIQIQRGIFQGDALSPLWFCLALNPLSELLNSTKLGYRFHKDMSEQTLTHLMYMDDIKLFAHSKDDLFQLADITQEFSKDIHMDFGVDKCKILAVNKGKIEQSSYILETGEPIQPIDKFSAYKYLGFNQSRRIHHNSIKAEVTKNFKHRLNLILKTHLNSKNTIKAINTYAIPILTYSFGIIRWNKTNLEKLQRIINTHLTKFRNHHPKASTQRLMLPRQEGGRGLIDIKNLHNTQIARLRQYFHTKSEHTKLHKHVTETDDRLTPLNLKNKQIQNNEQVISTQEKVATWAGKVLHGRHRAYLCQQHVDKDMSNEWLKRGELFPETEGFMVAIQDETVVTRNFRKHIIKDPLQVNDMCRHCNAAAETIQHITGACKSLAQSDYKHRHDQVAAIIHQQLAYRHQLIPKMIPYYKYKPDSVLENHNHKIYFDRTIITDKTIHYNRPDITVHDKVNKTVFLIDIAIPNSHNLQNTTSEKLSKYKDLAIELRTQWKVQTIHIIPIVLSSTGIIPKTLMQSLSTLKMPSYILHMIQKATILNTCRITRKFLTSSVISSATLAIE

SEQ ID NO: 32632 - protein, 1374 aa, Udranomia kikkawai
MHLRNRQIPQAGTRKGESRPEVSASGSPAYSGVGNVSHMTTQSNTAVVSHLSSHIPSDSSPIPSPNSLLISSPFSSPISSSYVFEDSVISRSSTVTPMPVDVVQATEVENLAPTAGNKRVRKRWSEEMNKFIWRTYLRITQIETTNLKSYLDILHQQFTTHFPEHSATRQRVGDQRRAIVRNKLLSQDILDQIKLEVREELDKEIDTNVQTFNRSQIFQRRRMNWNDDLNKTLIGCFYEVTDLGTNMTAYRKKLRDRFIEVCPHLAHLSEQRISDQQRAILNNKYISEDNLQHIKEQIRIQTQISFDYTLSTTSVTNQELNALEGQEQELDKESFERSQTMPVNTENITTTINRVDLEAEIREKIKTDFINNLQKFKDIDPTCRPYIPKQKTSRKLKMIVTYINKYILPEFLNENQDYTALQTVIYTSAFTAATCNGTIIGVSKENNRQQYKPQWQKRLEGKILDLRLNIGRLTQYAKGNRNRRIIKTVENIKLKYQSHGKYEKNNTNINEYLDTLKQKLNVASSRLRRYLTCTDRKRQNSQFLNNEKSFYRNLKSLHSNLSSKFIDTPLPDNLREFWANIWENPVEHNKIAEWISQNSKDFTPDSEMAFTHIPMEILVKVIKRTHNWKAAGTDNIHNFWYKQFTNTHPHILQALNNFLLDPDSMPLYITQGVTYMLPKDPKLLNDPAKYRPITCLQTIYKILTACLSEVLYEYLTKYNILAEEQKGCRKNSQGCKEQLTIDAIAMNTAATQKRNLHTMFIDYQKAYDSIPHSWLIHILEIYKIHPTIITFLQKSMQNWQTKLKIKQGTLFRITEPINIRRGIFQGDSLSPLWFCLALNPLSKLLNNTNLGFRFNENEQESRLTHLMYMDDIKLFAATRDELFQLVDITQQFSKDVHMQFGVDKCKILSMNKGIIENNIYILESGAPIESLDQHSTYKYLGVLQSTQIHHTTFKKDTTKQFKNRLNLILKSHLNSKNSIKAINTYAIPILTYSFGIIRWSKTDLKNLQRIISTHLTKHRKHHPRACTQRLTLSRQKGGRGLIDIENLHNSQITTLRTYFHSKSEHSLLHKHASEADNKHTPLNLKNRQTQINERITTAQEKIATWSGKVLHGRHRAHLCQQHVDENKSNEWLKRGELFPETEGFMIAIQDETIVTRNYRKHVIKDPKLVSDLCRHCNSMSETIQHIIGGCKSLAQTDYKHRHDQVAAIIHQQIAHRHHFIQKMIPYYKYKPDSVLENQDYKIYWDRTIITDKTIHFNRPDITYFDKINKIVYLIDIAIPNSFNIQNTISEKLSKYQDLAIEIKNQWKVQTVHIVPIVLSSTGIIPKSLTENLTKLKMPTYTLQMLQKATILNTCRITRKFLTSSTISSSTVILQ

SEQ ID NO: 32633 - protein, 1373 aa, Mimoniades nurscia
MKSTTRPRPQVPGGSSNLPDSDGSRAGAGSRGVYNLRARRTRQTTKACLQDLDLQCDKEPLSSPSSVGSLFQTPASSPNLFEMSSNSTSLTIAPRTVDVVQETRVDIPAPTTVTKRARKRWSDEMNRFIWRTYLQITKIETTRLNSYLQTLHQQFTERFPDMQATRQRVGDQRRAIIRNRLLSHDILDQIKTEVKDEIEMDDVVSLPSNSIHPTKNNNTNQDTQSKMKWSDSFNETLIRCFYEVTDLGKNLTAYRRNLRNRFIKEYPQLSHLSEQRISDQQRAIINNKYIPADKLQHIRTEVENQLINSEAQHQQYILPDTNPHVNVNKTHNENETEIEEYEFSQTQSTPQRKIDVLDMQTQEKLKADFAINFERFKNCNPISRPYIVKQKSSRKLAMIVAHINKYILPDYLKPQQTFITLQTIIYTAAYTAAIGNGTKIGTTRGEHRMKQKPGWQKRLEGKIQMLRCNIGRLTQYINGNRNKNIVKTVENIKIKYQIHTQHEDANTNMTEFLDTLKQKLNVASSRLKRYLTCTDRKRQNNEFLNNEKQFYRKLNLQAYSINKITDTPTASKLKEYWTNIWEKPVYHNKTAAWINQHTEALSLLPEMELSHIPLDTFVKVMKRIHNWKAPGTDNIHSYWYKKLTSVHPYLYENLNTILQAPNTMPNYVSQGITFLIPKDPKDTNNPAKYRPITCLQTIYKILTACISEVLYEHILKHNILAEQQKGCRKSSQGCKEQLTIDAIAMNSAATQKRNIFTMFIDYQKAYDSIPHSWLIHILELYKIHPTILIFLKETMKNWQTTLRIKHGTHIISTEPIKIQRGIFQGDSLSPLWFCLALNPLSELLNNTKLGFKFHKDMSEETLTHLMYMDDIKLFAHSKDDLFQLADITQKFSKDIHMDFGVDKCKILAVHKGKIEHNNYILETGEPIQPLDKFSTYKYLGFNQSRRIHHNAIKSDLTKKFKHRLNLILKTNLNSKNTIKAINTYAIPILTYSFGIIRWSKTDLVKLQRTINTHLTKFRNHHPKASIQRLTLPRQEGGRGLIDIKNLHNTQIATLRRYFHTKSDHTKLHKHVTEADNKLTPLNLKNKQIQSNEHIISAQEKVATWAGKVLHGRHRAHICQQHVDKEKSNEWLKRGELFPETEGFMIAIQDETVVTRNFKKHIIKDPLQINDMCRHCNAAPETIQHITGACKSLAQSDYKHRHDQVAAIIHQQLAYRHQLIPKMIPYYKYKPDSVLENNKHKIYFDRTIITDKTIHFNRPDITVHDKDNKIVYLIDIAIPNSHNLQNTTSEKLSKYKDLAIELRTQWKVQTIHIIPIVLSSTGIIPKSLVQSLSTLKMSPYTLHMLQKATILKTCRITRNFLTSSVISLATLAIE

SEQ ID NO: 32634 - protein, 1239 aa, Venada nevada
MNRFIWRTYLSITKIETINLRSYLQSLHQKFTEQFPNMEVTKQRIGDQRRAIIRNKLLSNEILNQIKNEVSAEINTEPLSSTHTNITENVNTNNTPHCRMRWSNKLNEILIQCFYEVTDLGKNLTTYRRKLRNRFIEVCPHLSHLSEQRISDQQRAIFNNKYITAEKLKHICNEVEKNYDINLPIVNNVQQQTPNARPLHEEEFQQGEPSHIQTSIPITHTESLDLQTQEKLKADFAANFKKFKNSDPTSRPYIIKQRLSRRLASIVAYIDKSILPEYLEADQSFLTLQTMIYTAAYTAAIYNGTRIGTSKNGANQKFIPAWQRRLEDKIQMLRCDIGRLTQYINGNRNRRILKTIENIKRKYQIHTQHENVNTKLNEFLDTLKQKLIVASNRLRRYLTCTTRKRQNKEFINNQKTFYRTLNSQMNTNNKIANIPEPNTLREFWANIWERPVQHNKVAEWINQYSNILTPHTEMEFSHIPIDTFVKVIKRTQNWKAPGTDNIHNYWYKKLTSAHPYVYNSLNNFLQIPDTMPTYISQGITFMIPKDLSDTNNPAKYRPITCLQTIYKILTSCISELVQEHLLKYNILAEQQKGCRKNSQGCKEQLTIDSIVMNFAATQKKDIHTMFIDYQKAYDSIPHSWLLEILQIYKISPIIIKFLENTMQKWQTSLKIKQDSHFISTEPIYIQRGIFQGDSLSPLWFCLALNPLSELLNKANLGIRFNNNVDETLTHLMYMDDIKLFAGNKDDLFQLADITQMFSRDIHMKFGVDKCKILSICKGKIEKNCYFLETGEPIQPIDQYSAYKYLGFHQSRRIHHNSIKLDLIHKFKHRLNLILKTYLNSKNTIKAINTYAIPVLTYSFGIIRWNKTDLEKLQRIINTHLTKYRTHHPKACTQRLTLARKDGGRGLIDIKNLHNTQIATLRRYFHTKSEHTTLHKLVTESDNRLTPLNLKNRLKQINENITATQEKITTWAGKVLHGRHRAYLCQQHVDKEKSNEWLQRGELFPETEGFMIAIQDETIVTRNFKKHIIKDPSQVSDICRHCNAAPETIQHITGACRSLAQSGYKHRHDQVAAIIHQQLAYRHQLIQKMIPYYKYKPDSVLEDNQHKIYFDRTIITDKTIHFNRPDITIHDKVNKIVYLIDVAIPNSHNLQNTTSEKLSKYQDLAIELRTQWKAQTIHIIPIVLSSTGIIPKTLLESLKTLKMPTYTLHMLQKATILNTCRITRKFLTSSVISSATLEIQ

SEQ ID NO: 32635 - protein, 1373 aa, Morvina fissimacula
MESTTRPRPQVPGGSSNRPDSDESQAGVGFRGVYNLRVRKSRQTTTACLKDSDLQRDKEIINSPESSRSLFQSLVSSPCSFEHPISSRSSTSTTVSVDVVQETEVEKLAPTTGLKRARKKWSHDMNTFIWRTYLQITQIETTNLRSYLDPLHQQFTARFPDMHATKQRIGDQRRAIIRNKYISQENFNRIKEEVTIELAEKSTVSKTSIPENSNTPHTSQRSKMCWTDTLNESLIRCFFEVTNAGNNLTAYRKNLRNRFIHAYPNLSHLSEQRISDQQRAIMNNKYISDNRLQQIRKEVEMQLSSNTPVNTSSQTFNNNIPLNDDIFGTQKEQFPAEENFDLTETQPINHIKIGTAQVIDSHLQQKIKEDFTTNLEKFKSSEPTSRPYIPKQKTSKKLAMIVEFINQHILPEHLKLEHDFNTLQTLIYTGAYTAATCNGSRIGNSYNNTAQNYKPVWQKRLENKIRILRCDIGRLTQFIQGNRNKHVARTVEKIKKMYKIHAQYENNNMDLKDFLDTLKQKLNVTSSRLRRYLTCTERKQQNKRFINNEKMFYRKLNAAHSNVNKNTEMPCPSALRDFWANIWENPVQHNDTADWIYQNSKLETHTKMEFKCIPEDTFVKVIKRTHNWKAPGTDNIHNFWYKRLTNTHSYLLSVLNSFLKSPSIMPLHITEGVTYMMPKDLSDTKNPAKYRPITCLQTIYKILTACISEVMYDYLSSHNILNEEQKGCRKNSQGCKEQLTIDAIAMNTAATQKTNIYTMFIDYKKAYDSIPHSWLIKILQLYKIHPIIVSFLQQSMHKWRTILKIRQNEFSITTEPIHIKRGIFQGDALSPLWFCLALNPLSELLNQTQLGYRLNNTVNGKLTHLMYMDDIKLFATTKDELFQLADITQQFSKDIHMELGVDKCKTLSIHKGKIEKNSYILETAEPIEPMDHYSTYKYLGFKQSRKIHHSTIKIDLIKNFKHRLNLVLNTHLNSKNCIKAINTYAIPILTYSFGIIKWSKTDLDKLQRIISTHLTKYRKHHPKACTQRLTLPRQEGGRGLIDIKNLHNTQISTLRQYFFAKSEHSFLHKFATESDNKLTPLNLRDRQTQTNEHIINAQDKIAAWAGKVLHGRHRAYLCQRHIHKAKSNEWLKRGELFPETEGFMIAIQDETIVTRNYKKHILKDPKQTSDLCRHCNAASETIQHVTGGCRALAQTDYKYRHDQVASIIHQQLAYRYRLIPKMIPYYKYIPDSVLENQSFKVYWDRTILTDKTIHFNRPDITIHDKTNRTVYLIDIAIPNSHNIQNTISEKLSKYQDLAIELRTQWKVQAVHIIPIVLSSTGIIPQSLMLSLKSLDMPHYTLHLLQKATILNTCRITRKFLTSSTISSSSVTLI

SEQ ID NO: 32636 - protein, 1220 aa, Mimoniades versicolor
MKSTTRPRPQVPGGSSNLPDSDGSRAGAGSRGVYNLRARTTRQTTKACLQDLDLQCDKEPLSSPSSVGSLFQTPASSPNLFEMSSNSTSLTIAPRTVDVVQETRVDIPALTTVTKRARKRWSDEMNRFIWRTYLQITKIETTRLNSYLQTLHQQFTERFPDMQATRQRVGDQRRAIIRNRLLSHDILDQIKTEVKDEIEMDDVVSLPSNSIHPTKNNNTNQDTQSKMKWSDSFNETLIRCFYEVTDLGKNLTAYRRNLRNRFIKEYPQLSHLSEQRISDQQRAIINNKYIPADKLQHIRTEVENQLINSEAQQYILPDTNPHVNVNKTHNENETEIEEYEFSQTQSTPQRKIDVLDMQTQEKLKADFAINFERLKNCNPISRPYIVKQKSSRKLAMIVAHINKYILPDYLKPQQTFITLQTIIYTAAYTAAIDNGTKIGTTMGEHRMKQKPGWQKRLEGKIQMLRCNIGRLTQYINGNRNKNIVKTVENIKIKYQIHTQHEDANTNMTEFLDTLKQKLNVASSRLKRYLTCTDRKRQNNEFLNNEKQFYRKLNLQEYSINKITDTPTASKLKEYWTNIWEKPVYHNKTAAWINQHTEALSLLPEMELSHIPLDTFVKVMKRIHNWKAPGTDNIHSYWYKKLTSVHPYLYENLNTILQAPNTMPNYVTQGITFLIPKDPKDTNNPAKYRPITCLQTIYKILTACISEVLYEHILKHNILAEQQKGCRKSSQGCKEQLTIDAIAMNSAATQKRNIFTMFIDYQKAYDSIPHSWLIHILELYKIHPTILIFLKETMKNWQTTLRIKHGTHLISTEPIKIQRGIFQGDSLSPLWFCLALNPLSELLNNTKLGFKFHKDMSEETLTHLMYMDDIKLFAHSKDDLFQLADITQKFSKDIHMDFGVDKCKILAVQKFKHRLNLILKTNLNSKNTIKAINTYAIPILTYSFGIIRWSKTDLVKLQRTINTHLTKFRNHHPKASIQRLTLPRQEGGRGLIDIKNLHNTQIATLRRYFHTKSDHTKLHKHVTEADNKLTPLNLKNKQIQSNEHIISAQEKVATWAGKVLHGRHRAHLCQQHVDKEKSNEWLKRGELFPETEGFMIAIQDETVVTRNFKKHIIKDPLQINDMCRHCNAAPETIQHITGACKSLAQSDYKHRHDQVAAIIHQQLAYRHQLIPKMIPYYKYKPDSVLENNKHKIYFDRTIITDKTIHFNRPDITVHDKDNKIV

SEQ ID NO: 32637 - protein, 1367 aa, Paramimus stigma
MNSTTKLRPQVPGGARSLPDSDGSQAGSGSRGVYNLRVRKPRQTTKAMLKEPDLANDMEQPASPQSTISLFRSPTPSTSSYDNSLHSRSSLTTPTSMDVVQETEVDKLASTIGVKRARKRWSENMNIFIWREYLRITQIETTNLKSYLTQLHLQFTKQFPTMNVTKQRVGDQRRAIIRNKLVSQEVLNGIKLEVTSELKENLQIHSSTYQEMTTNTTSAVQLAQRRKMSWTNTHNETLIKCFFKVTDLGNDLTAYRKKLRSAFIQQYPNLSYLSEQHVSDQRRAIINNKYLTDNTIEQIREEVARNLRRNHASPSTCAQKQSYPHLQNTILEEQREQEMERRELNIPHIHLTKNSQTHTPYTLDPHLQDKLQTEFTVNLERFKDSDPTDRPHIPKQKTSHKLEMLVDYINKDILTAYLKPNLDFIILQTLIYTAAFTAATWNGSKIGTFSNNTKQSTKPAWQKRLEKKLLSLRVDIGHLTQYIQGNKNKTITKTVEKIKISYKVHGKYENVNTKLKEYLDTLKQKLNVASSRLKRYLTCTDRKRQNKHFKNNEKSFYRNLDSSQSYKHISLTATPDELHKFWANIWEKSTEHNNNVDWITANSRAPTMNTEMKFEDISKDTFFKVITRTHNWKSAGTDNLHNFWYKKLTNTHPYLLNNLNTYLKHPEKLPPYMTQGVTFMLPKDLNDTNNPAKYRPITCLQTIYKIFTACISELIYEYLSTNNILTEEQKGCRKYSQGCKEQLTIDAIAMNTAFTQKRNIHTMFIDYQKAYDSIPHSWLLRTLHLYKIHPTIISFLEHSMQMWQTSLKIRQDENYICTETIRIKRGIFQGDALSPLWFCLALNPLSELLNKSNLGYNISTNSVESKLTHLMYIDDIKLFANSKADLFELADLTEKFSEDIRMEFGIDKCKILSINKGKIEDNTYTLKTGKQIEALDHNATYKYLGFKQSRKIHHSTIKSELKQKFKCRLNLILNTYLNAKNTIKAINTYAIPTLTYSFGIIRWSKTDLISLQRIINTHLTKFRKHHPKACIQRLTLSRQEGGRGLIDLTNLHNKQISNLRQYFFSKCEKSLLHKHASESDNKLTPLNLRNRQIQINENIINQQEKITRWSEKSLHGRHRAHLCQKYVDKNKSNEWLIKGELFPETESFMIAIQDETIATRNYKKHIIKDPKQTDDSCRQCNMASETIQHITGGCRNLAQTDYKHRHDQVAAIIHQQIAYRNRLVSQMIPYYKYKPNSVLEDNNCKIYWDRTIMTDKTIHFNRPDITLHDKVNKIAYLIDIAVPNSNNIQNTISEKLNKYRDLAIALKTQWKVQKTHIIPIVLSSTGIIPQTLLKSLAALNMPHYTLHMLQKATILNTCRITRNFLTS

SEQ ID NO: 32638 - protein, 1368 aa, Gesta gesta
MQSTTRPRPQVPGGSSYYPDSDGSRAGAGSRGVYNLRVRKPRQTTNACSMDSDLQNDKERSSTPSSTRSLFQSPPSSPSIFDRPSSSRSSTVTPVSVDVVQAATVDNLASTTELKSARKRWSEEMNKFIWRTYLRITQIETINLKSYLDQLHQHFIIHFPTMHASRQRVGDQRRAIIRNKYLPEEVLNQIKAEVIEELTQSETVSQSTFITNTQNVNTLQSRRMMWSEALNESLIKCFYEVTELGKNLTAYRKNLRNRFIDMHPNLSHLSEQRLSDQQRAIINNKYISDEKLQCIKREVERTMSHSTSTIIISQPLDRTLPHDTYDTETPEEQEIEREENQTLHTNTNTTQHLDTHFQQDIKLNFMANLERFTGSDPISRPYIPKQRTSRKFSMIVNYINKNILPEHLTAELDFVSLQTLVYTGAFTAATCNGTKIGTQKEKCSQKIIPAWQKRLENKIQMLRSDIGRLTQYIQGNRNKNIVKTVDKIKIKYQIHAQHGNINVQLVDYLDTLKQKLSVASSRLRRYLVCTNRKRQNKNFTNNEKLFYRNLSSTHTNNQTTEVPAENVLREFWANVWENPVEHNKNADWIEQSKKMFSLNTEMDFENIPMDTFLKVIKRTHNWKSPGTDNIHNFWYKKFTSIHKLIHCNLNTFLHNPNTLPPYITQGVTYMLPKDLHDTKNPAKYRPITCLQTIYKILTACVSEIIYEYLSKHNILSEEQKGCRKNSQGCKEQLTIDAIAMNTAATQKRDIHTMFIDYKKAYDSIPHSWLIEILQLYKIHPTIVSFLQKSMQTWQTTLKIRLSEHLISTEPIHIQRGIFQGDALSPLWFCLALNPLSELLNGTKVGFRFNNNSTEQTLTHLMYMDDIKIFASTKEELFHLADLIQKFSTDVHMEFGVDKCKIFSIHRGKIENNSYILDNDETIEPLDQYSSYKYLGFKQSRKINHNSIKNELTNKFKHRLNLLLKTHLNSRNTIKAINTFAIPILTYSFGIIRWSKSNLENLQRIISTNLTKHRKHHPKACTQRLTLPRQEGGRGLIDIRNLHNSQISSLRNYFHTKSEHSFLHKYITEADNHLTPLNLKDKQLQTNEETIDTQSKIAAWSEKALHGRHRAHLCQQHVDKEKSNEWLRRGELFPETEGFMIAIQDEMIVTRNYTKHIIKDPNQVSDICRHCNAAPETIQHITGGCRSLAQRDYKHRHDQVAAIIHQQLASRHKLIPKMVPYYKYKPNAVLENKTCKLYWDRAVMTDKTTHFNRPDIMLHDTINRTVYLIDIAIPNSHNIQNTVAEKLSKYQDLAIELRTQWKVQKIQIIPIVLSSTGIIPKSLLQSLTTLNMPPYTLHMLQKATVLNTCRITRKFLTSSTISSASLTIM

SEQ ID NO: 32639 - protein, 1210 aa, Erynnis brizo
MQATRQRVGDQRRAIIRNKYLPQDLLDQIKSEVINELAQAEIASQNLSTANTSNTYTSERRRMIWSDALNESLIRCFFEVTDLGSNLTAYRRNLRNRFIDAHPELSHLSEQRISDQQRAIINNKYLSEEKLQHIKREVEKSMPKNTSVVTHISSQSLTIGLNDNPVETQIEEEIETEENDSRRTNTDTSNTTQKLNIQTQEHIKLEFMKNLERFKGSEPTTRPYIPKQKTSRNFAMIVDFINKNIIQELLTPEQDFTSLQTLIYVGAFTAAICNKTRIGTFRENSGKKEKPAWQKRLENKIQMYRSDIGRLTQYIKGNRNKIITITVDKIKIKYTTHAQYDNKNVQLKDFLDTLKQKLNVASTRLRRYLKCTDCKRQNRDFTNNEKLFYRNLNSTHKSNQSAELPSKDVLRDFWAGIWENPVDHNKNVDWISQSRKISSLNTEMEFENIPIEVFLNVIKRTKNWKAPGTDNIHNFWYKKFTSTHPFIHNTLNTFLQSPNIIPSYITQGVTHMLPKDLQDTTNPAKYRPITCLQTIYKILTACVSEMIYEYLSKQNILTEEQKGCRKKSQGCKEQLTIDAIAMNTAAKQKRDIHTMFIDFKKAYDSIPHSWLIEILHLYKIHPTLILFLQQTMQTWQTTLNIRLNENRITTEPIHIQRGIFQGDALSPLWFCLTLNPLSELLNQTELGFKFDRKAVKGTLTHLMYMDDIKIFANTKEELFHLADLTQKFSDDVQMEFGVDKCKILSIHKGKIVNNRYTLENGEPIEPLDQYSTYKYLGFRQSRKIHHNTIKSDLIKNFRHRLNLILNTQLNSNNTIKAINTFAIPILTYSFGIIRWSKSNLENLQRIISTHLTKHRKHHPKACTQRLTLSRQEGGRGLIDIRNLHNTQISTLRKYFHTKSELSSLHKHTTEADDQLTPLNLKNKETQTNEQTVDAQKKIATWSEKALHGRHRAHLCQQHVDKEKSNEWLKRGDLFPETEGFMIAIQDETIATRNYRKHIIKDPSQVVDICRHCNAASETIQHITGGCRSLAQTDYKHRHDQVAAIIHQQLAFRHQLIPKMVPYYKYKPDAVLENQTCQLYWDRTVMTDKTVHFNRPDIILYDKINETVYLIDIAIPNSHNIQSTVTEKLGKYQDLAIQLRTQWKAQKIQIIPIILSSTGIIPKSLLQSLKTLNMPPYTLHMLQKATILNTCRITRKFLTSSIITSTSLTVI

SEQ ID NO: 32640 - protein, 1368 aa, Erynnis tages
MESTTRPRPQVPGGPSYLPDSDGSRAGAGSRGVYNLRVRKPRQTTYACSKDTDLQNVKENSSSSLSSRSLFQSPPSSPFSPSCSRSSTVSPVSVDDVQEAKADNIAPTTELKSARKRWSEEMNRFIWRTYLRITQVETTNLNSYLGPLHQHFTTQFPNMQATRQRVGDQRRAIIRNKYLPQDLLDQIKSEVINELAQSETASQILSTANTSNTYTSERRRMIWSEALNESLIRCFFEVTDLGRNLTAHRSNLRNKFIDTHPDLSHLSEQRISDQQRAIINNKYLSEEKLEHIKKEVEKSMSKNTSVVTHISSQSLTRGLLDNPVETQIQEETETEENDSRQTNTDTSNTTQTLNIQTQEHIKLEFMKNLERFKGSDPTTRPYIPKQKTSRNFAMIVDFINKNIIQELLTPEQDFTSLQTLIYVGAFTAAICNKTKIGTLRENSGKKEKPAWQMRLENKIQMYRSDIGRLTQYIQGNRNKIITITVDKIKTKYATHAQYDNQNVQLKDFLDTLKQKLNVASTRLRRYLKCSDRKRQNRDFINNEKLFYRNLNSTHKSNQTAELPSKDELRDFWAGIWENPVDHNKNVDWISQSRKMSSLSTEMEFENIPIEVFLNVTKRTKNWKAPGTDNIHNFWYKKFTSTHPFIHNTLNTFLQSPNIIPSYITQGVTHMLPKDLHDTTNPAKYRPITCLQTIYKILTACVSEMIYEYLSKQNILAEEQKGCRKKSQGCKEQLTIDAIAMNTAAKQKRDIHTMFIDFKKAYDSIPHSWLIEILHLYKIHPTLILFLQQTMQTWQTTLNIRLNENRITTEPIRIQRGIFQGDALSPLWFCLALNPLSELLNQTELGFKFDRKAVKGTLSHLMYMDDIKIFANTKEELFHLADITQKFSDDVQMEFGVDKCKILSIHKGKIVNNRYTLENGEPIEPLDQYNTYKYLGFRQSRKIHHNTIKSDLIKQFRHRLNLILKTQLNSKNTIKAINTFAIPILTYSFGIIRWSKSNLENLQRIISTNLTKHRKHHPKACTQRLTLSRQEGGRGLIDIRNLHNTQISTLRKYFHTKSELSSLHEHTTEVDDQLTPLNLKNKETQTNEQTVDAQKKIATWSEKVLHGRHRAHLCQQHVDKEKSNEWLKRGDLFPETEGFMIAIQDETIATRNYRKHIIKDPSQVFDICRHCNAASETIQHITGGCRSLAQTDYKHRHDQVAAIIHQQLAFRHQLIPKMVPYYKYKPDAVLGNQTCQLYWDRTVMTDKTVHFNRPDIILYDKINETVYLIDIAIPNSHNIQSTVTEKLSKYQDLAIQLRTQWRAQKIQIIPIILSSTGIIPKSLVQSLKTLNMPPYTLHMLQKATILNTCRITRKFLTSSIITSTSLTVI

SEQ ID NO: 32641 - protein, 1383 aa, Signeta flammeata
MESKTRALPQVLGGAGYVADSDGSRHCTGSRGVYNLRARKTRQTTKACLKDPDLQSDKDLSTSPSTTRSLFPSPTSSPSNWEYPTYNSRSSSITSMAVDVVQEAEAENIAPTTGHKRARKRWSEEMNRFIWRTYLCITHIETTNMKSYLNPLHQQFSTHFPDMQATRQRIGDQRRAILRNKLLSQELLTQIKTEVISELNNSNAGSHIDIQTHVPKALVPVQRSQRRKMTWSNAINETLIRCFYEVTDVGKNLTAYRRNMRNKFIDAYPQLSHLSEQHISDQQRAILKNKYIPEEQLQQIRREVESSLYNNTSLVTLAHNQVDIDPCLQDKNEVPQNEQTVEREEFELLHTHSGTHIQNTPTKKNTERLDIQLQTNLELEFLTNLQTFNNTDPTTRPYIPRQRTSKKLAMIVGQINDNVLPEILTPEQDFNTLHTIIYTAAFTAATFNGTKIGTHKEHTRLNFKPSWQKRLEGKIQMLRSHIGRLTQYIQGNRNKNVVKTVENIKIKYQIHARHENINTQLKEFLDTLKQKLSTASSRLKRYLTCTYRKQQNKNFLNNEKIFYRNLNSSHLTNNKSTDMPTPDTLREFWANIWENPVEHNRSAEWINRNMEVNNAQMEFKQIPIDTFIKVIKHTHNWKAPGTDNIHNFWYKKLTIIHPYLYNHLNNFLQSPNTMPTYITNGVTFMLPKDPSDLSNPGKYRPITCLQTIYKILTACISELINEYLSLHNILAEQQKGCRKNSQGCKEQLTIDAIVMNTAATQKRNVHTMFIDYQKAYDSIPHSWLIEILHIYKIHPTIISFLQTSMQNWQTTLKVRNNTHFTTTEPIHIQRGIFQGDALSPLWFCLALNPLSFLLNETKAGFKICNNVTDGALTHLMYMDDIKLFAATKDDLFQLADITQKFSKDVQMDFGVDKCKILSVNNGKIENNSYTLDTGVMIEPMNQYNTYKYLGFKQSRRIHHTNIKSELRNKFENRLNLILKTHLNSRNTIKAINTYAIPILTYSFGIIRWSKTDLKKLQRTISTHLTKHKKHHPKACTQRLTLCRQEGGRGLIDIENLHNTQISILRRYFHSKSEQTSFHKYVTEADNKLTPLNLKNKQTHTNEHINHAQNKIAIWAGKVLHGRHRAHLCQQHVDKEKSNEWLKQGELFPETEGFMIAIQDETIVTRNYRKYVIKEPTQTTDSCRHCNAASETIQHITGGCRSLAQSGYKHRHDQVASIVHQQLAFRYKLIPKMIPYYKYKPEPVLEDRNYKIYWDRTIITDKTIHFNRPDITVHDKKDHTVFLIDIAIPNSHNVQSTISEKLGKYQDLAIELRTQWKVKTVHIIPIVLSSTGIIPKSLIYSLNTLNMPHYTLNMLQKATILNTCRITRKFLTSSSISSATLTIE

SEQ ID NO: 32642 - protein, 1237 aa, Chiomara georgina
MNRFIWRTYLQITHLETINLKSYLDSLHQQFNQQFPNMQASRQRVGDQRRAIIRNKYLSQEVLEEIKTEVTDELTKSQTISRIVFKGNSQNINTGQRCRMIWSETLNESLIRCFFEVTELGTNLTAHRRSLRNRFIDRHPSLSHLSEQRISDQQRAIINNKYITDERLQQIRKEVESNMKTSNVSQPLSTPQYEATEETQKEQEIDRAESEMEININTTQHLDTQLQEHIQLQFKINLEKFTGSDPTSRPYIPRQKPSKKFAMIIDFIDKNVLPEHLNSELCFTSLQTLVYIGAFTAATCNGTKIGSCKENCSKKTTPAWQKRLENKIQILRSDIGRLTQYINGNNNRKITKAVNKIKLKYQKHAEYDNTNTQIKEFLDTLKQKLNVTSSRLRRYLTCTNRKRQNKDFVNNERNFYRTLNNTTHTNSTNKDVPSETDLHNFWANIWGNPVEHNKNADWISSSSRKPPATEMEFENIPMEIFLKVIKRTQNWKTPGTDNIHSYYYKKFTCTHPHIYNSLNYFLQYPDSVPIHLTHGVTYMLPKDPDDTKNPAKYRPITCLQTIYKILTACISEVIYEYLDQHGILTEEQKGCRKNSQGCKEQLTIDAIALNTAVTQKRDIYTMFIDYQKAYDSVPHSWLIEILQIYRIHPTIVHFLQNIMQNWQTTLKIRQNEHLITTEPIRVQRGIFQGDALSPLWFCIALNPLSHLLKETKLGFTFDNNSSETKLTHLMYMDDIKIFADTKKELFHLADVTQRFSKDIHMAFGVDKCKILSVHKGKIENNSYTLETGSAVEPLDEHSTYKYLGFKQSRKIHHNTIKVELTKKFKHRLHLILNTHLNSKNTIKAINTFAIPTLTYSFGIIRWSTSNLDNLQRLINTHLTKFRKHHPRSCTQRLTLPRQEGGRGLIDIKNLHNSLIAKLRKYFHMKAEQSMLHKCTIAADNKLTPLNLKDKQTQTNEKTIDTQNKIDTWREKALHGRHRAYLCHQHVDKEKSNEWLKRGELFPETEGFMVAIQDETIVTRNYKKYIIKDPSQCSDICRHCNAASENIQHITGGCRSLAQTDYKHRHDQVAAIIHQQIAFRYQLIPKMVPYYKYKPDSVLENNTYKLYWDRTIMTDKTIHFNRPDITLHNKIEQTVYLIDVAIPNSHNIQNTIADKLSKYQDLAIEIKTQWKVQKIQIIPIVLSATGIIPKSLVQSLSTLNMPPYTLHMLQKATILNTCRITRKFLTSSTISSASLTII

SEQ ID NO: 32643 - protein, 1362 aa, Telicota sp.
MKSTTKPRPQVPGGSRNLPDSDGSQERAGPRGAYNLRARKPRQTTTTASIKDTDLHFDKEPLSPSTNQSLFSSPNSSMNSFEDCDRSTQSPESVDVVQEAAADIIAPTIDHKRARKRWSEEMNRFIWRTYLRITQIETINLKSYLSSLHQQFIAHFPTMQATRQRVGDQRRAIIRNKLLSLEILDQIKTEVTLEITNSTAQTHLNSQTQQSYTTATHETSHRCKMSWSDSLNEALISCFYEVTDIGKNLTAYRTNLRNKFIDLYPHLSHLSAQRISDQQRAIINNKYISEDRLKQIRKDVQSMLHNKTPTDSHPNQIDHYLISHTVEESAPLEQQVESTEVDAINIQGLDAETHEKIESDFNTNLQRFQNSDPTSRPYIPRQKTSKKLAIITSHVNKNILPKYLTSDLEFSTLQNIIYTGAFTIATNNGTKIGVNKEYTQLNSKPQWQKRLENKIQLLRSHIGRLTSYIQGNRNKKIIKTVEHIKINYQNHARYESTNIELTEFLDTLKQKLNIASNRLRRYLTCTDRKRHNKNFVNNEKTFYRNLNTSESNNINNTQMPTPELHREFWAKIWENPVEHNKSIDWTSQNIKVPNNQMEFKDIPFTTFIKIIKHTHNWKAAGTDNIHNYWYKHFTSTHTYLYNHLNKFIQHPHTIPTYITHGVTFLLPKDQNNTNDPSKYRPITCLQTIYKILTACISELIYEHVLHHNILAEQQKGCRKNSQGCKEQLTIDAIVMNIAYKNKRNIHTMFIDYQKAYDSIPHSWLIEILQIYKINPTIITFLHTSMQRWQTCLKIKFDKQFIITEPINIRRGIFQGDALSPFWFCLALNPLSHLLNSTQLGFNIKNTTSESLTHLMYMDDIKLFANSKEDLFQLADITQFFSQDIKMDFGVEKCKILSVHNGKIENNNYTLEPGKQVEAIDEYSMYKYLGFNQSRQIQHSKIKVELRKKFERRLNLILKTYLNSRNTIKAINTYAIPLLTYSFGVIRWTKTDLKNLQRTINTHLTKYRKHHPKACTQRLTLSRQEGGRGLIDIENLHNTQISILRKFFHAKAEQTSLHKNITEADDKLTPLNLKNKQTQDNEEINNAQEKTETWSKKVLHGRHRAHLCLPYIDKEMSNEWLRKGELFPETEGFIIAIQDETIVTRNYKKFIIKDPKQTNDLCRRCNAASETIQHITGGCKSLAQTDYKHRHDQIGAIIHQQLAYKYKLIPKMKPYYKYKPVPVLENKFLKIYWDRTIMTDRTIYANRPDITIHDKSNKVVYLIDIAIPNSHNIQNTISEKLGKYQDLAIQLKTQWGAQAIHIIPIVLSSTGVVPKSLIQNLNTLGMPHYTLHMIQKAAIINTCHITRKFLSSSTVTSSNLIIQ

SEQ ID NO: 32644 - protein, 1326 aa, Timochares trifasciata
MTTASLKDSDYAYDMGQPSTNGTLFQTPDSSPKHSEAFSSPRSSSFTPTSVDVVQETEVNNLVPTTGNKRARKRWSDEMNRFIWRNYLQITQIESINLKSYLSSLHQKFSEHFPSMQATRQRIGDQRRAILRNKYLSEETLLQIKMEVASELDKAQSTSHSNTHNINTIEISNLNYTPHSSKMSWSNTLNETLIRCFYEVTDLGNNLTAYRRKLRNRFIDMCPHLAHLSEQRISDQQRAILNNKYIAEEKLFQIKNEVKNHLLQGSSVERPTVLNDSLRDNVMDNEIENEETDLTPRGFNTIQGNAESLEPTIQEKLKTDFAKNFYKFKDTDPTAREYIPKQRMSKRFSMVVTYIDNTILPEYLESSQNFITLQTLIYTAAYTAATFNNTKIGTSKINKADEKHKPQWQKRLENKILMLRSDIGRLTQYINGNRNKNIIKSVDNIKTKYHIHTQYEDTNTKVEEFLDTLKQKLNVTSSRLRRYLTCTARKQQNKEFSCNEKRFYRNLSTQIHDGHKTSKFPAPDILRNFWANIWEQPVDHNKTADWIKKNTEMWEQHTQMENANIPIDTFVRVLKNTHNWKAPGSDNIHNFWYKKLKSTHSHIYSNLNKFLESPDSLPMYITEGITFMLPKDPNETDNPAKYRPITCLQTIYKILTGCISEIIYKHITEHNILAEQQKGCRKNSQGCKEQLTIDSIVMNIAATQKRDLYTMFIDYQKAYDSVPHSWLIQTLYNHKIHPIIIAFLEKSMQKWQTVLKIRQGTTSLTTEPIRIKRGIFQGDALSPLWFCLALNPLSELLNNTNLGFKLDFNKVDGNLTHLMYMDDIKLFANTKDDLFEIANITQQFSEDICMEFGVDKCKVLSICQGKIEDNSYILKNNKVIQPIDQYSTYKYLGFHQSRRIHHNSIKLELTNKFKYRLNIILKTYLNSRNTIKAINTYAIPILTYSFGIIRWNKTDLEKLQRVISTHLTKFRSHHPKACTQRLTLPRHEGGRGLIDIKNLHNTQVTKLRCYFHSKSEQVDFYKYITQADNKLTPLNLRSKEVQGNEYITLPEEKILTWNGKVLHGRHRTHLCQQHVDKEKSNEWLKRGELFPETEGFMIAIQDETIVTRNFRKYVMKDPAQANDVCRHCSAATETIQHITGGCRSLAQSDYKHRHDQVASIIHQQLAYRYKLIIKMVPYYKYKPSSVLENTQFRMYWDRTIITDKTIHFNRPDITVHDKINSKVYLIDIAIPNSHNLQNTTSEKLSKYQDLAIELKRQWKAQIIQIIPIVLSSTGVVPKTLLRSLDSLEMPTYTLNMLQKATILNTCRITRKFLTSSTITSATLAIE

SEQ ID NO: 32645 - protein, 1378 aa, Cycloglypha thrasibulus
MNSKTRPRPQVPGGPSYLPDSDGSRAGTGSRGVYNLRVRKPRQTTTACLKDSDFLYDMEHPSSPSSIGSSCQTPISSPKLLEPICSSRSSSVTSISVDVVQETEVSNLAPTTGNKRARKRWSDEMNRFIWRTYLRITQIETINLNSYLPSLHQQFSEHFPSMQATRQRIGDQRRAILRNKYLSQDILNQIKVEVSSELVKPQSESHFVAHINTLEKNNLNNTSQCSKMSWSNTLNETLIRCFYEVTELGRNLTAYRRNLRNRFIDLCPHLAHLSEQRISDQQRAILNNRYITDEKLQQIKNDVKNYLLQSSSVDDVQDVTLLDENLRNNITDKDIVGDMEKEEVDSSLTNSNTIQRTTEHLAQEVQEKLKADFAENFNKFIETNPTAREYIPKQRTSRKFSLIVAYIDSNILPEYLETTQSFFTLQTLIYTAAYTAAIYNGTKIGESKISKVNEIYRPPWQIRLEKKILILRSDIGRLTQYMNGNRNKNILKFVDNIKAKYQIHTQHENTNTKVEHFLDTLKQKLNVASSRLKRYLTCTARKHQNKDFACNEKKFYRNLSIQSSNSHKTPHLPTPDIFRDFWANIWENSTEHNKSSNWMQEISEAWELNTQMEYTLIPFETFITVLRHTQNWKAPGSDNIHNFWYKKLRSTHTHIYTNLNTFLESPESMPSYMTEGITFMLPKDLNDTDNPAKYRPITCLQTIYKILSGCISELLYKHLTKNNILAEQQKGCRKNSQGCKEQLTIDSIIMNIAANLKRDLYTMFIDYQKAYDSVPHSWLIQTLHNYKIHPNIIFFLEQTMQKWNTVLKVRHGTTSVTTEPIHIKRGIFQGDALSPLWFCLALNPLSELLNNSSIGFKIDSNATDGNLTHLMYMDDIKLFSDTKDGLFKLADITQQFSDDIRMDFGVDKCKMLSICKGKIEENSYTLNTGKVIQPIDQYSTYKYLGFNQSRRIHHNSIKVDLTNKFKNRLNLILKTYLNSRYTIKAINTYAIPILTYSFGIIRWNKADLEKLQRIINTHLTKFRSHHPRACSQRLTLPRNEGGRGLIDIKNLHNAQVTKLRYYFHSKSEQVGFYKYITQADNKLTPLNLKDKQIQSNEYITVPQHKITVWSGKVLHGRHRAHLSQQYVDKDKSNEWLKRGELFPETEGFMIAIQDETIVTRNFRKYIIKDPLQVSDLCRHCNAASETIQHITGGCRSLAQSGYKHRHDQVASVIHQQLAYRHKLISKMVPYYKYKPESVLENKQYKIYWDRTIITDKTIHFNRPDITVHDKTNHEVYLIDIAIPNSHNLQNTTSEKLNKYQDLAIELRRQWKAHTIHIIPIVLSSTGIVPKTLLQSLDSLDMPSYTLNMIQKATILNTCRITRKFLTSSTISSATLAIE

SEQ ID NO: 32646 - protein, 1369 aa, Achlyodes mithridates
MKGTTRPWPQVPGGSSDLPDSDGSRAGTVSRGVYNLRARKTRQTTKACLKDSDLHCDKEQPSSPSSNGTLFQSPVSSPKSYEELVTSVDVVQETEVDNSAPTIVNKRATKRWSEDMNRFIWRTYLHITKLETINLNAYLPSLHQQFSKKYPGMQATRQRVGDQRRAILRNSLLSIETLEQIKSEVIEELKTTIPHVTTIPVTNIQDTDMISSQKVKMSWSDALNETLIKCFYEVTDLGKNLTAYRRNLRNKFVNIFPHLSNLSEQRISDQQRAILNNKYITDEKLLEIRREVESQLSQSSTLVITQPQIQTDTHGYDNLIVTDIEQEIERHNETETLQNHLNTTQKFVEDLPTQIKEKIHTSFAGNLERFKSSIPNSRPYIPRQRSSKKLAMITTYMNKIILPEILRSDQDFITLQTVIYTAAYTVATCNGTKIDTNNERYDKKDIKPPWQKRLENKISNFRTDIGRLTQYIQGNRKRSIVKTVENIKLKYKIHTLHENANTELKDFLDTLKQKLNAASSRLRRYLTCTKRKRQNANFKNNEKTFYRNLNALHSNTQNNNINVKSPTADNLREFWANIWEHPVEHNENEDWTRRNTLATPNTEMKFDEIPVDIFLGVIKNTHNWKAPGTDNIHNYWYKKFTSTHKYLHIKLNSFLKSPDTMPAYVTEGVTFMLPKDLNDTLDPSKYRPITCLQTVYKLLTGCISEMVNEHITQHNIMAEQQKGCRRNSQGCKEQLTIDSIAMNTAYKEKRDIHTMFIDYQKAYDSIPTIPHSWLLQILQIYKIHPTITSFFEISMKNWQTSLRMKQDTHIITTEPIRIKRGIFQGDKFSPLWFCLALNPLSDLLNQTNLGFKFNNSMTEGNLTHLTYMDDIKLFASTKDELFHLADITQQFSTDIKMQFGVDKCKILSVYKGKVEMNNYLLQSGESIEPLDQYSTYKYLGFKQSRRLHHNSIKSEIIHKFKLRLNLLLKTYLNSKHTIQAINTFAIPILTYSFGIIRWTKTDLKKLQRIISTHLTKYRKHHPKACTQRLTLPRHEGGRGLIDIENLHNTQIHTLRQYFHSKSEQTNLHKHAVEADDKLTPLNLRNKQTQSNENINRNQEKITTWTGKVLHGRHRAHLCQQYVDKDKSNEWLKCGELFPETEGFMIAIQDETIATRNYKKHIMKDPKQINDSCRHCKAAPETIQHITGGCKSLAQTDYKHRHDQVAAIIHQQLAYRYQLIPKTIQYYKYKPSSVLENNKYKIYWDRSIITDKTIHFNRPDITVYDKIKKIVFIVDIAIPNSHNVQNTIAEKHSKYQDLSIELKNQTIHIIPIVLSSTGIIPKTLLQSLNTLNMPPYMIRMIQKATILNTYRITRKFLTSSVISSATLSIY

SEQ ID NO: 32647 - protein, 1381 aa, Eantis tosta
MKGTTRPRPQVLGGSSDLPDLDGSRAGTGSRGVYNLRARRTRQTTKACLKDSDLHCDKEQPSSPSSNGTLFQSPVSSPKSYEESVSSRTSTITPTSVDVVQETEVESSAPTIVNKRARKRWSHDMNRFIWRTYLHITKIETINLKSYLSSLHQQFAEQYPGMQATKQRVGDQRRAILRNNLLSVDTLEQIKSEVIQELKTTKTIPHMPTIPVINFQDTDKSISQKGKMSWSDPLNETLIRCFYEVTDLGKNLTAYRRNLRNKFVDIFPHLSNLSEQRISDQQRAILNNKYVTEEKLLEIRTEVENQLYNSSTVMTTQPQIQIDTQTCDNLIIADTEEEIERHDETETLQTHLNKAQKHVEELPTQIKEKLRTEFTVNYERFKNTSPNSRPYIPRQRVSKKLAMVTAYMNKSILPEILSPDQDFITLQTVIYTAAYTVATCNGSKIGTNSECNGKKDFKPSWRKRLESKIGNLRADIGRLTQYIQGNRKKCIVKTVENIKLKYQIHTQHEHVNIELNEFLDTLKQKLNAASSRLRRYLTCTERKRQNANFKNNEKTFYRNLNSQYSNTQSNNLNIKAPTADKLREFWANIWEHPVEHNIYAKWISQNTPMTPNTEMKFKEIPLDIFCRVVKNTHNWKAPGTDNIHNFWYKKFTSTHTYLHNKLNSFLKSPDTMPAYVTEGVTFMLPKDLNNTLDPAKYRPITCLQTIYKLLTGCISEMIHEHITQHNIMAEQQKGCRKNSQGCKEQLTIDSIAMNTAAKEKRDIHTMFIDYQKAYDSIPHSWLIQILQVYKIHPIITSFLEISMKNWQTSLRIKQGTHIITTEPISIKRGIFQGDALSPLWFCLALNPLSDLLNQTNLGFKFNSSIIEGNLTHLMYMDDIKLFASTKDELFQLADITQQFSKDIKMEFGVDKCKILSVYKGKVEMNNYILESGEPIEPLDQYSTYKYLGFKQSRRIHHNSIKSEIIQKFKFRLNLLLKTYLNAKFTIQAINTYAIPTLTYSFGIIRWTKTDLKKLQRIINTHITKYRKHHPKACTQRLTLPRHEGGRGLIDIENLHNTQIATLRRYFHSKSEQTNLHKQAVEADDRLTPLNLKYKETQSNENTIRSQEKITTWTGKVLHGRHRAHLCQQYVDKDKSNEWLKRGELFPETEGFMIAIQDEVIATRNYKKYIMKDPKQVNDSCRHCKAAPETIQHITGGCKSLAQTDYKHRHDQVAAIIHQQLAYRYQLIPKMIQYYKYKPSSVLENSKYKIYWDRSIITDKTIHFNRPDITVYDKIKKTVFIIDIAIPNSHNVQNTIADKLSKYQDLSIELKTQWKVQAIHIIPIVLSSTGIIPKTLLQSLNSLNMPPYTIRMIQKATILNTCRITRKFLTSSVISSATLAIY

SEQ ID NO: 32648 - protein, 1375 aa, Polyctor polyctor
MKSTTRPRPQVPGGASNFPDSDGSRDGTGPRGVYNLRVRKNRQTTMARLNDSELQYDMEPASSPSSSTISLFQTPVSSPVTLNSSPSSKTSPMSVNVVHETEVDNNAPTTVNKRARKRWSDDMNRFIWRTYLQITKIETKNLKSYLSLLHQYFTEKFPNMQATRQRVGDQRRAIIRNKLLSNDTLKQIKTEVTQELDINEMVPSTTIQADKTLNTDILCNTQKVKMHWSDELNETLLKCFYEVTEIGTHLTSYRSRLRSKFIEVCPHLSHLSEQHLSDQKRAIINNKYISEEKIIQIRKEIENKLHKNASNAYRPTQMLHDMSLDDNTINTEGGQEMEIEEIELSQNLTKTTQQNTECLDIPLKKKLMDDFTSNLDFFKNSDPSERPYIPKQKISRRLALIVSYVNKDILPQFLKPELSFIDLQTSIYTAAYTVAICNGTKIGKSKEHRSKQNFKPLWQIRLENKIKTLRADIGRLTQYIQGNRNKRLINAVEIIKDKYHTHTQYENKNTELYEFLDTLKQKLNAVSSRLRRYLTCTERKIQNNNFKNNEKNFYRNLNTHTHPNNTITEKISPDKLREFWAKIWEEPVEHNNAAEWIDDEKLSRPKNEMEFKCIPMDIFIKVIKKTHNWKAPGTDNIHNYWYKKLTSTHIYLYNHLNTFLQHPDTMPNYVTQGVTVMLPKDLNDISNPAKYRPITCLQTIYKLMTACICEILQEHLLKNNIMFEQQKGCRKDSQGCKEQLILDSIAMNTANKYKRNIHTMFIDYQKAYDSIPHSWLIKILHIYKIHPTIISFLKSSMVRWQTSLKIRQGTQLITTDTIYIKRGIFQGDTLSPLWFCLALNPLSELLNQTNLGFRFNKTVLEGNLTHLMYMDDIKLFAGTKNDLYKLADITEKFSSEIHMNFGVDKCKVLSVCKGKIESNSYTLNSGEIIEPLDQHSTYKYLGFQQSKRIHHNSIKAEILQKFKYRLNLILKTFLNSKNTIKAINTYAIPLLTYSFGIIRWTKSDFNNIERIIRTHLTKYRKHHPKACTQRLTLPRQEGGRGLIDIENLHNTQIGTLRRYFRSKCEQSPLHLNAAEADEKFTPLNLKNKQTQPNEHIKNNQEKIQAWTEKALHGRHRAHLCQPYVDKEKSNEWLKRGELFPETEGFIIAIQDETIVTRNFLKHIIKDPKQVNDFCRHCNAAPESIQHIIGGCRCLAQTDYKHRHDQVAAIIHQQLAFKYKLIPQMTQYYKYKPNSVLEDHKYKIYWDRTIITDKTIHYNRPDITIHDKINKTVYLIDVAIPNSHNIQSTASQKLSKYQDLAIELRTQWKANNVHIIPIVLSSTGIIPTTLLRNLSTLNLPDYTLHMLQKATILNTCRITRKFLTSSTIAAASTSMQ

SEQ ID NO: 32649 - protein, 1403 aa, Hyalothyrus neleus
MLTSATSIYHLIPIFPTNDPKPKEDMKGTTRPRPQVLGGSSNLPDSDGSRAGTGSRGVYNLRARTNRQTINASLKDSDSKDDKERSSSPSSTRSLFQTPISSPNSFELLINSRSSTVTPTAMDVVQETEVENLAPNIVNKRARKRWSDEMNRFIWRTYLQITRIETINLRSYLPSLHQKFTELFPAMQATRQRIGDQRRAILRNKLLTLQVLNQIKTEVIEELETTETTPHTTLQKNDTQCIGKSNIIGNNKMSWSNDLNETLIRCYYEVTDVGKNLTAYRKNLRNRFIDRCPHLSHLSEQRISDQQRAILNNKYIPEGRLLDIRRDIEQHLHNDNSLIPIQPHTEIDSSVCYNTTTTQINQEIERAEQTDPSHTQFIETHKQLDILDTRMQEKLQMEFTDNYNNFKNSNPTARPYIPKQKTSKKFAMIVEYINKNILPKVLKADQNFTTLQTIVYTSAYTAATCNGTKIGINREHYSKQCLKPAWQKRLECKINKLRADIGRLTQYIQGNRNSNIIKTVKNIKVKYQIHTQYENRNTELKEFLDTLKQKLNVASNRLKRYLTCTERKRQNNNFKNNEKTFYRNLSTTHSNDKNILETPEADKLREFWANIWQHPVEHNVNADWIKRNQLSTPEMEMEFQHIPLNIFLKVIKNTHNWKAPGTDNIHNFWYKKLTSTHSYIYNNLNDFLQFPDTMPAYITQGVTFMLPKDLNDTCNPAKYRPITCLQTTYKLLTGCISEMIYEHLIKYNILAEQQKGCRKNSQGCKEQLTIDSIAMNTAATHKRDIYTMFIDYQKAYDSIPHSWLLKILQMYKIHPTIVSFLCTTMKNWQTSLKIKYNSHFITTEPIHIQRGIFQGDALSPLWFCLALNPLSDLLNQSNLGFKFNNSLLEGNLTHLMYMDDIKLFASTKDELFQLADITQKFSQDINMEFGVEKCKTLSICKGKIEENNYMLETGESIQSLDQYNTYKYLGFKQSRRIHHNSIKLEIIQKFKYRINLILKTFLNSKNTIKAINTYAISILTYSFGIIRWNKTDLKKLQRIISTHLTKHRKHHPKACSQRLTLPRQEGGRGLIDIQNLHNSQIATLRRYFHSKSEQSSLHKCAAEADDRLTPLNLKSKQTQPNEHITNAKEKITTWTGKVLHGRHRAHLCQQYVDKEKSNEWLSKGELFPETEGFMVAIQDETILTRNYKKYIIKDPKQANDACRHCNAAPETIQHITGGCRSLAQTDYKHRHDQVAAIIHQQLAYRYQLIPQMIQYYKYKPESVLEDKKYRIYWDRTIITDRTIHFNRPDITVLDKINKTVYIIDIAIPNSHNIQNTTSEKLNKYQDLAIELRTQWKVQTIHIIPIVLSSTGIIPKTLLRSLSTLDMPTYTLHMLQKATILNTCRITRKFLTSSTISSATLAIE

SEQ ID NO: 32650 - protein, 1376 aa, Grais stigmaticus
MKDTTRPRPQVPGGSSSLPDSDGSQAGTGSRGVYNLRARKPRQTTKACIKDSDLQCDKERSTSPSSTRSLFESPVSSPNPFELSASSRSSTATPTSVDVVQETEVVNLAPTTVNKRARKRWSDEMNRFIWRTYLQITQVETINLKSYLPLLHKQFTEQFPAMQATRQRVGDQRRAILRNKLLSVDILNQIKTAVHQELEITAKTPNMPTNEINNIESANKSNLSQRSKMSWSSTLNETLMKCFYEVTDLGKNLTAYRTNLRNRFIDVCPHLSHLSEQRISDQQRAIVNNKYLSNDKLLEIRREAEKHLDSTNPLSFTSHREECDTSMCDNSTLIQQQPEVEIQEEIESLQTTQKQPESLDIVIQEKLQMDFRLNFENFKNSNPTSRQYIPKQKSSKKFAMIVAYIDKHILPEFLKTDLNFIKLQTIIYTAAYTAATCNGTKIGIDRERNIKQTFKPSWQKRLEAKIRTLRAEIGRLTQYIQGNRNRGVVKTVENIKSKYQRHTQYENINVELKEFLDTLKQKLNAASNRLKRYLTCTDRKRQNNKFKNNEKAFYRNLNIQHSNTHADHNTDTPTADTLREFWANIWEHPVEYNTTADWIQKTLSKSYTEMELEHIPIDIFLKVIRSIQNWKTPGTDNIHNIWYKKLTSTHSHIHNYLNTFLQFPDLMPTYITEGITFMLPKDLKDTRNPAKYRPITCLQTIYKLLTGCISEMLHDHLTKYNILAEQQKGCRKNSQGCKEQLTIDSIAMNTAATQKRDIFTMFIDYQKAYDSVPHGWLLQVLEAYKIHPTIISFLQTSMKNWQTSLKIKQDTNFITTEPIYIKRGIFQGDALSPLWFCLALNPLSELLNETNLGFQFNNSILEGNLTHLMYMDDIKLFASTKDKLFQLTDITQKFSEDIQMKFGVDKCKILSVKKGKIEDNSYILKTGEIIEPLDQHSTYKYLGFKQSRRIHHNSIKLEIIQKFKYRLNLILKTHLNSKNIIKAINTYAIPILTYSFGIIRWTKTNLKKLQRIINTHLTKYRKHHPKACTQRLTLPRQEGGRGLIDIENLHNTQIGLLRRYFHAKSEQSNLHKYATEADDKLTPLNLKHRESQVNEHITNAQEKIAIWSGKVLHGRHKAHISQQYVDKEKSNEWLRKGELFPETEGFMIAIQDETIVTRNYKKYIMKDPKQTSDLCRHCNAAPETIQHITGGCRSLAQTDYKHRHDQVAAIIHQQLAYRYKLIPKMIQYYKYKPDSVLENKKYKIYWDRTIITDKTIHFNRPDITVHDKINKTVYIIDVAIPNSHNIQNTTSEKLSKYQDLAIELKTQWRVQTIHIIPIVLSSTGIIPKTLMRSLNILSIPTYTVSMLQKATILNTCRITRKFLTSSTIHSATLGIN

SEQ ID NO: 32651 - protein, 780 aa, Aethilla lavochrea
MTPNTEMEFKEIPIDIFLKVIKGTHNWKAPGTDNVHNFWYKKFTSTHTHIHNKLNEFLKSPDTMPTYVTEGVTFMIPKDLNDTYNPAKYRPITCLQTIYKLLTGCVNEMVHEHITQHNTMAEQQKGCRKNSQGCKEQLIIDSIAMNTAAKQKRDIHTMFIDYKKAYDSIPHSWLLQILKIYKIHPTITTFLETTMKNWQTSLRIKQDTQFITSEPICIKRGIFQGDALSPLWFCLALNPLSDLLNHTNLGFKFNQSIIEGNLTHLMYMDDIKLFASTKDKLFQLADITQEFSKDIKMEFGVDKCRILSVYKGNVEMNNYVLQTGESIEPLDQYSTYKYLGFKQSRRIHHNSIKSEIIQKFKYRLNLLLKSFLNSKNIIKAINTYAIPILTYSFGIIRWNKTDLTKLQRIISTHLTKHRKHHPKACTQRLTLPRQEGGRGLIDIENLHNTQIATLRRYFHAKSNYTKLHKHVVETDDRLTPLNLKYREIQNNEKITKTQDKIATWTGKVLHGRHRAHLSQQYVDKDKSNEWLKRGELFPETEGFMIAIQDETIVTRNYKKYIMKDPKQLNDLCRHCNGAPETIQHITGGCRSLAQTDYKHRHDQVAAIIHQQLAYRYQLIPKMIQYYKYKPSSVLEDKKYKIYWDRSIITDKTIHFNRPDITVLDKINKTVFIIDIAIPNSHNLQNTIAEKLSKYQDLSIELQTQWRVQTIHIIPIVLSSTGIIPKTLITNLNTLKMPTYTLHMIQKATILNTCRITRKFLTSSVISSTSLSMCKPHHSLG

SEQ ID NO: 32652 - protein, 1324 aa, Ectomis labriaris
MIKLMESKTKPRPQVPGGTSHFPDCDGSRAGTGSRGAYNLRVRKPRQTTTACLKDTDLQSDNEQPISPSTRSLFSTPISSPNPFENSIEPRSFTVTPESVDVVQTAEADILAPTTGNKRARKRWSEEMNRFIWRTYLHITRIETINLKSYLHTLHQQFATRFPTMQVTRQRIGDQRRAILRNSLLSQETLNQIKAEVIKDLEKTEIVLNEACTTQNADTFQASQRRKMSWSHELNETLIRCFYEVTEIGKNLTAYRRKLRNRFIEVCPQYSHLSEQRISDQQRAIINNKYLTDETLEYIRTQVENCLPIAASENLFTGSISENNASSLDIITPTQSEVHIDREESEASQLTHIQYLDIQMQDKIKANFLNNLEVFKNTDPTTRPYIPKQKTSKRLAMIVAYINENILPNHLKLDHDFITLQTIIYSAAFTVATCNGANISTARRDRKQYLKPMWQQRLENKINNLRSDIGRLTQYINGNRKKCVLKTVENIKIKYQIHARYENTNTKLTEFLDTLKQKLSVASSRLKRYLKCTERKRQNRSFTNNERYFYRNLNSSHSRSDIITEVPTPDELHQYWANIWENPVEHNKTATWIPRTALNTPNTDMEVEHISMDTLLNVIKRTHNWKAPGTDNIHNFWYKKFTSTHSYIHIILNAFLKFPDKMPTFVTQGVTFMLPKDPCDTNNPAKYRPITCLQTIYKILTACISEMVYKHLSKHQMLAEQQKGCKKNSKGCKEQLTIDAIAMNTAIAQKRNIYTMFIDYQKAYDSIPHSWLIETLEIYKIHPTVISFLQTSMQRWQTKLKIMQNMQAISTEPIKIQRGIFQGDALSPLWFCLALNPLSDLLNKTNLGFHFNNDIAEGALTHLMYMDDIKLFATTKDELFQLADITEQFSRDICMNFGVDKCKVLSINKGKIEMNRYILEDGIPIEPLDQNNTYKYLGFKQSKQINHKQIKFEITKQFRHRLNVLLKTCLNSKNTIKAINTYAIPVLTYSFGIIKWSQTDLVKLQRTVNTHLTKYRKHHPKACTQRLTLPRHEGGRGLIDIKNLHNTQITTLRQYFYSKSELTSLHKHAVETDDRLTPLNLKNRQTQSNEHIIRTQEKIASWADKVLHGRHRAHMCQQHVDKEKSNEWLRRGELFPETEGFMIAIQDETIVTRNFKKYIIRDSQQTSDLCRHCSAASETIQHITGGCKSLAQTDYKHRHDQVAAIIHQQLAYRHRLIPIMIPYYKYKPDSVLEDNKYKMYWDRTIITDKTIYFNRPDITIHDKINKTAYLIDIAIPNSNNIQNTTSEKLSKYQDLAIELKTQWKVDIVNEDAFQLLITAACGNL

SEQ ID NO: 32653 - protein, 1235 aa, Cycloglypha thrasibulus
MNRFIWRTYLQITQVETINLKTYLDSLHQHFTTKFPNMQATRQRVGDQRRAIIRNKYLPQEVLEQIKIEVIDELTKSNTLSQVTFMENTQNNNTSQRRRMVWSEALNESLIRCFFEVTELGKNLTAYRKSLRNKFIDTHPELAHLSEQRISDQQRAIINNKYISDEKLQEIKREVETNISPVIISQSSTRFNTVEAQREQEIEREENEILQINTTNTIQGLDIHLQEYLQAQFSINLEQFSGSDPTSRPYILKQKTSKKFAMIVDYINKNILPRHLNSELDFISLQTLIYTGAFTAATCNGTKIGIIKENCNRKITPAWQKRLEDKIQMLRSDIGRLTQYMQGNRSKKITKTVDKIKLKHQMHAQHENMNTVVKEFLDTLKQKLSVASSRLRRYLTCTKRKRENKDFINNEKLFYRKLSSTHTSNQATDIPPITDLHNFWSNIWEKPVEHNNNAEWICRSNKLAPNSKMIFENIPIETFLKIIKRTQNWKAPGTDNIHNFWYKKFTSIHPLLYNNLNTFLKFPDTMPTYITHGVTFMLPKDVNDPKNAAKYRPITCLQTIYKILTGCVSEVICEYLTKHGILTEEQKGCRKGSQGCKEQLTIDAVAISAAVTQKRDIYTMFIDYQKAYDSIPHSWLIEILHLYKIHPTITSFLQIAMQNWQTTLKIRQNEQLITTEPIRIQRGIFQGDALSPLWFCLALNPLSHLLQETKLGFKFDKSTPESIINHLMYMDDIKLFASNKDDLFHLADVTQMFSKDIHMEFGVDKCKILSVRNGKIENNSYTLESAATIDSLDQYSTYKYLGFKQSRKIHHSTIKVELTKKFRHRLSLILNTHLNSKNTIKAINTFAIPILTYSFGIIRWSTANLENLQRIISTHLTKFRKHHPRSCTQRLTLQRQEGGRGLIDIKNLHNTQIATLRKYFHAKSEYSTLHKCATEADDHFTPLNLRDKQTQANEQTIDTQKKIAAWSDKALHGRHRAHLCQQYVDKEKSNEWLKRGELFPETEGFMIAIQDETIVTRNYKKYIIKDPSQLSDICRHCNAASETIQHVTGGCRSLAQTDYKHRHDQVAAIIHQQIAFRHQLITKMVPYYKYKPDSVLEDNTYKLYWDRTIMTDKTIHFNRPDITLHNKTEKTVYLIDIAIPNSHNIQNTVAEKLSKYQDLAIELKTQWKAQKIQIIPIVLSSTGLIPKSLVQSLSTLNMPPYTLHMLQKATVLNTCRITRKFLTSSTISSASLTII

SEQ ID NO: 32654 - protein, 1455 aa, Aurina azines
MDFISLAENVAPSGPIMKMNINNNFRYNLRSLTRAQVTNSIGTAENEEQIKNSPKYSTHEDTAADRQTCLSTPTSSMESLFESPASTPKSYEESERCSRGVYNLRTKKPRQTTKACLKDSDFLSDKDQQSSPSSTRSLFPSPSSSAYPNGEYQNIPSRSPTTTPTTTPESVDVVQMTDVEILAPTTGNKRVRKRWSEEMNKFIWRTYLIITEIETTNLKSYLHTLYQQFTAQFPAMEATRQRVGDQRRAIIRNKLLSEEILTQMKAEVKKELEKSDRISCTPSEANSVQNIHTFQSSQRQKMSWSNELNETLIRCFYEVTDIGKNLTAYRKKLRNRFIEICPELLHLSEQRISDQQRAILNNKYISEERLELIRRQVENCLINDTSENSYTQTYPKADTWLLNNLTDTQIDLRTEREESETQLIDHTHLSRTHTYTQLDIEMQEKIKIEFMYNLEKFNATDPTSRPYIPKQKTSKRLAMIVAHINENILPNHLKLDQNFTSLQTIIYTGAFTAAICNGTKIGTTKQCRKKHSKPMWQRRLEGKIRNLRSDIGRLTQHINGNNNKRVVKVVEKIKIRYQIHARYENNNIKLTEFLDTLKQKLNVASSRLKRYLLCTDRKQQNKEFITNEKTFYRNLNSARTQSNSISVPPTPDELRQYWANIWENPIEHNKTADWIHQDITKSIPNDVMEVKEIPMTTLLKVIKRTHNWKTPGTDKIHNFWYKKFTSTHSYIYNNINIFLQSPHKMPSFVTQGVTFMLPKDLTDTSNPAKYRPITCLQTIYKILTACISEIVYEHLSKHDVLAEQQKGCRKNSQGCKEQVTIDAIAMNTAVKQKRNIYTMFIDYQKAYDSIPHSWLIQILQIYKIHPTIISFLETSMQNWQTTLKIKQGDHFILTEPIRIQRGIFQGDALSPLWFCLALNPLSELLNMTNLGFKFDKNVVEGSLTHLMYMDDIKLFASSKDELFQLADITQRFSRDVGMEFGVDKCKVLSVNKGKIENNSYILENGISIEALDQYNTYKYLGFKQSRQIHHKSIKLEITKQFKHRLNLILKTCLNSKNTIKAINSYAIPTLTYSFGIIRWSKTDLKRLQCTINTHLTKYRKHHPKACTQRLTLPRQEGGRGLIDVKNLHNTQITTLRRYFHSKTEYTCLHNYVIEADDKFTPLNLKNRQTQTNEHISNVSEKITTWAGKVLHGRHRAHMCQQHVDKEKSNEWLRRGELFPETEGFMIAIQDETVVTRNFKKYVMKDPKQTTDLCRHCNAASETIQHITGGCRALAQTDYKHRHDQVAAIIHQQLAYRYQLIPKMVPYYKYKPDSVLEDHKYKIYWDRTIITDKTIYYNRPDITIHDKTNKTAYLIDIAIPNSHNIQNTTSEKLSKYQDLAIELQKQWKLHTIKIVPIVLSATGIIPKTLLHSLDTLLLPFYTLHMIQKATILNTCRITRKFLLSFTTISSATLQIV

SEQ ID NO: 32655 - protein, 1379 aa, Muschampia tessellum
MMQSTTRPRPQVPGGSSNRPDPDESRDGTGSRGVYNLRVRKNRQTTQARLKDYDLRHDKETPTSPASSQSLFESPISSPIHSEYSFSSRSSSTTTVSVDVVQETETVNVPAPTTGLKRARKRWSYDMNTFIWRAYLRITQIETINLRSYLDSLHQQFTVQFPDMQATKQRVGDQRRAIIRNKLLTQDIMDNIKSEVLQELNETNVNIQTQDAPMTNSSHTSQKRKMKWTEDLNECLIRCYFEATDLGKNLTAYRKIMRNKFINIYPNLSHLSEQRLSDQQRAIINNKYISNNRIQQIKRDIESQITNNTSGIACSHSQVVYNNIAAIETESVIDTEEINPLQLQSNICEKLTTEPILDEETQQKLKTDFLANLERFNGSDPISRPYIPKQKTTKIFTAIVSHINSKILPELLKPDQDFSILQTLIYTSAFTAATYNGAKFRTSDTDIDRSRTFTPKWQKRLEQKIKDLRFDIGRLTQYIQGNRNKRIVKTINKIKIKYQIHAQYDNINTQLKDFLDTLKQKLSVASSRIRRYIVCTERKTQNRHFTNNEKTFYRNLSATQSNKNKETSEVPLTEELHNFWSNIWQRSVEHDKTIDWNERNKRLSKLNAEMEFERIPLDTFIKVIKHTHNWKAPGTDNIHNFWYKKLTSTHLYVYNTLNSFLKSPNTMPSYVTQGTTFMIPKDLNDTKNPAKYRPITCLQTIYKILSACISDVIHDYLTKHNILTEEQKGCRRYSQGCKEQLTIDAIAMNSAVTQKRNIYTMFIDYQKAYDSIPHSWLIETLKIYKIHSTIISFLEQSMLYWQTSLKIRQNEKFITTEPIYIRRGIFQGDALSPLWFCLALNPLSELLRDTGIGYRFNKEGDGEKLSHLMFMDDIKLYASNKDELFQLADLTQKFSKDVQMSFGVDKCKTLSIAKGKIEKNSYTLESGELIQPIDQYSTYKYLGFKQSRKIHHNTIKAELMKTFKHRLRLILNTHLNSKNIIKAINTYAIPILTYSFGIIRWSKTNLETLQRTISTHLTKYRKHHPKACLQRLTLPRQEGGRGLIDIKNLHNTQISTLRRYFHAKSEHSPLHKNAIEIDNKLTPLNLKDRQTQNNEHITSAQDKIATWSEKVLHGRHRTHLCQEYVDKAMSNEWLRKGELFAETEAFMIAIQDETIPTRNYKKYIIKDPAQTNDLCRQCKAASETIQHITGGCRALAQNDYKHRHDQVAAIIHQQLAYKHRLIPKMIPYYKYKPETILEDNNFKLYFDRTIMTDKTIHYNRPDITMHDKINSTVYLIDIAIPNSHNLQNTTSEKLAKYQDLAIELKTQWKVKNIHIIPIVLSSTGIIPVTLIQNLNILNMPSYILHMLQKATILNTCRITRKFLASAAINSSSLSMIGII

SEQ ID NO: 32656 - protein, 1428 aa, Pholisora mejicanus
MALVLLIIIIITPLRGHLGVVGGLTGKNTANLALHLKIKHLFSQLTTPNRGAMMQSTTRPRPQVPGGSSNFPDPDGGRAGPGSRGVYNLRVRKNRQTTDARLKDSDLQRDKETPTSPSSSQSLFPSPISSPINFEDPLSSRSSSTTTVSVDVVQETEVNKPAPTTGLKRARKRWSEDMNIFIWRTYLRITQIEAINLRSYLDLLHQQFTGQFPDMQASKQRIGDQRRAIIRNKLLSQEKLDRIKVEVIQELNEAKNNIQEQNAPISNSCHTAASQKQKMNWTEDLNESLIRCYFEATDLGTNLTAYRKSMRNKFVNIYPNLSHLSEQRLSDQQRAIINNKYISNDRLQKIKLDVEKRLTNNKSDIEYSETHSVYNTIANIVTEAVIEREEPFLSQLQSAPYREPNSALILGPHIQEKIKVEFFANLEIFSNSDPTSRPYIPKQKASKNLTMIVSHINSKILPQLLKPDQDFSTLQTLIYTSAFTAATCNGSKIETAQIRRDQTFKPKWQIRLENKIQDLRFDIGRLTQYIRGNTSKKIIKTINKIKNKYKIHAQYDNINTEIKEFLDTLKQKLSVASSRMRRYVVCTERKRQNLDFISNEKMFYRKLNILKSNTNQESTQELSIEDLHDFWSNIWEKSVEHDKTVDWSEINSRVSTKLNTEMKFEHIPLDTFIKIVKRTHNWKTPGTDNIHNFWYKKLTSTHSYIHSALNAFIESPNTMPKYISQGMTFMLPKDLSDMKNPAKYRPITCLQTIYKILSACISDIMYDYLIKQNILTEEQKGCRKYSQGCKEQLTIDAIAMNSAVTQKRDIYTMFIDYQKAYDSIPHSWLIETLKIYKIHPTIISFLKQSMLCWQTSLRIRQNNQFITSQAIHIRRGIFQGDALSPLWFCIALNPLSELLKSTDVGYKFNRDVDGEKLTHLMFMDDIKLYAANKEELFQLADITQKFSKDVQMNLGVDKCKTLSICKGKIEKNSYTLETGELIQPVDQDSFYKYLGFKQSRKIHHNTIKAELMKTFKHRLCLILNTHLNSKNTIKAINTYAIPILTYSFGIIRWSKTNLNTLQRIINTHLTKYRKHHPKACSQRLTLPRQEGGRGLIDIKNLHNTQITTLRRYFHAKSEHSSLHKYAIAADNKLTPLNLKDIQTQDNEYITNAQDKITTWTEKVLHGRHRAHLCQQHVDKEMSNEWLRKGDLFPETEAFMLAIQDEAIPTRNYKKHIIKDPAQVNDLCRHCKATSETIQHVTGGCRALAQNDYKHRHDQVAAIIHQQLAYKHRLIPKMIPYYKYKPETILEDQNIKIYWDRTIMTDKTIHFNRPDITMHDKINSTVYLIDIAIPNSHNLQNTISEKLTKYQDLAIELKTQWKVKTIQIIPIVLSSTGVIPISLIHNLNILNMPSYTLHMLQKATILNTCRLTRKFLTSTTVNSTSISII

SEQ ID NO: 32657 - protein, 1237 aa, Chiomara georgina
MNRFIWRTYLRITHLETINLKSYLDSLHQHFNQQFPNMQATRQRVGDQRRAIIRNKYLSQKVLEEIKTEVIDELTNSQTISQITIKENSQNINTGQRCRMVWSEALNESLIRCFFEVTELGTNLTAHRRNLRNRFIDIHPNLSHLSEQRISDQRRAIINNKYITDERLQQIRREVESNMPTSIVSQPLLSTPYKDTVETHEEPDIERVEREIEVNINTSQHLAIQLKEHIQLQFNINLERFTDSDPTCRPYIPKQKTSRKFTMIVDFINKNILPEHLNSEMSFTSLQTLVYIGAFTAATCNGTKIGTDKDNSNKKTTPAWQKRLENKIQMLRSDIGRLTQYINGNVNRKVTKAVDEIKIKYQKHAEYENTNTQLKDFLDTLKQKLNVASSRLRRYLVCTKRKRQNNDFANNERIFYRNLGKTTHTNNKTLDIPSKTDLQNFWANIWGNPVEYNKKADWIKRSSRISPGIEMEFENIPMEIFLKVIKRTQNWKTPGTDNIHNYYYKKFTCTHPLIHNSLNNFLKYPNSIPKHLTHGVTYMLPKDPDDTKNPAKYRPITCLQTIYKILTACLSEIIYEYLDEHGILTEEQKGCRKNSQGCKEQLTIDAIAMNTAVSQKKDIYTMFIDYQKAYDSIPHSWLVEILHIYRIHPTVIHFLQNIMQNWQTTLKIRQNEHLITTEPIRIQRGIFQGDALSPLWFCIALNPLSQLLKDTNLGFHFDKNSSETKLTHLMYMDDIKLFASTKDDLFHLADVTQEFSKDIHMTFGVDKCKTLSVHKGKIENSSYTLESGAAIEPLDQHSTYKYLGFKQSHKIHHNIIKGELTKIFKHRLRLILNTHLNSKNTIKAINTFAIPTLIYSFGIIRWSVANLENLQRLINTQLTKFRKHHPRSCTQRLTLPRQEGGRGLIDIKKLHNSQIAQLRKYFHVKAEYSTLHKSTAAADNKFTPLNLKDKQTQTNEQTIDIQTKIATWTEKALHGRHRAQLCQQHVDKEKSNEWLKRGELFPETEGFMLAIQDETIVTRNYKKYIIKDPNQSSDVCRHCNAAPENIQHITGGCRSLAQTDYKHRHDQVAAIIHQQIAFRHRLIPKMVPYYKYKPEAVLEDHTHKLYWDRTIMTDKTIHFNRPDITLHNKIEQTVYLIDVAIPNSHNIQNTIADKLSKYQDLAIELKTQWKVQKIQIIPIVLSSTGIIPKSLVQSLSTLDMPPYTLHMLQKATILNTCRITRKFLTSSTISSASLTII

SEQ ID NO: 32658 - protein, 1379 aa, Potamanaxas melicertes
MSSKTRPRPQVPGGSSHLPDPDGSRAGTGSRGAYNLRVRKPRQPTTACLKDSDSQCDMEIPSSPTSTGSLFQTPNSSPQPFESISSSRSSTLTPTSMDVVQETEVNLVPTAGNKRARKRWSDDMNQFIWRTYLQITRIETVNLNSYLSSLHQNFSEHYPSMQATRQRIGDQRRAILRNKYLSDDILNKIKMEVRAQLDKPDSGSQLNIQMNNSQNNNVSYVPQTSKMSWSNTLNETLIRCFYEVTDLGKNLTAYRKNLRNRFIELCPHLAHLSEQRISDQQRAILNNKYIVDENLLKIKNEVQNSLLRNSSVDHTQHLTIFEETLRENTMDRVTEEDELTELALTQPTRIHSKTESLEEETQIKLKTEFANNFDKFKDTNPTAREYIPKQRTSKRFSMIVAYIDNSILPEYLESTHSFITLQTLIYTAAYTAATCNGTKIGISKITHEKQKPPWQKRLENKILMFRSDIGRLTQYINGNRNKNILKVVNKIKAKYQIHTQYEDTNTKEEDFLDTLKQRLNAASSRLKRYLACTARKHQNRDFICNEKKFYRNLGTESHNDQRMSNLPTPSNLRDFWANIWENSVEHNKTAEWISENTPGELNIQMEYRHIPIETFIRVLKHTHNWKSPGSDNIHNYWYKRLRSTHSHIYTNLNNFLEFPDSLPSYITEGITFMLPKDLNEPHNPAKYRPITCLQTIYKILSGCISEMIYEHLAKHNILAEQQKGCRKNSQGCKEQLSIDSIVMNTAATQKRDLYTMFIDYQKAYDSVPHSWLIQTLDNYKIHPKIISFLQKTMQKWHTILKTGQGINSLTTEPIYIKRGIFQGDALSPLWFCLALNPLSEMLNNSNVGFKFDSNNENLTHLMYMDDIKLYADTKDDLFKLADITQKFSEDIKMEFGVDKCKVLSIYKGKIEGNSYILNTGKIIQPLDQYSTYKYLGFNQSKLIHHNSTKLDLTNKFKHRLNLILKTHLNSRHTIKAINTYAIPILTYSFGIIRWNKADLEKLQRIISTHLTKFRSHHPKACTQRLTLPRHEGGRGLIDIRNLHNTQITRLRCYFHSKSELVGLYKCITEADNKLTPLNLKNKHIQSNEHITMPQDKIATWSGKVLHGRHRAHLCQQYVDKEKSNEWLKRGELFPETEGFMIAIQDETIVTRNFRKYIIKDPLQVSDLCRHCSAAPETIQHITGGCRSLAQSDYKHRHDQVAAIIHQQLAYRCQLIAKMVPYYKYKPDSVLENKQYKIYWDRTIITDKTIHFNRPDITIHNKTDNTVYLIDIAIPNSHNLQNSTSEKLSKYKDLAIELKRQWKAQTIHIIPIVLSSTGVIPKTLLQSLKSLKMPSYTLNMLQKATILNTCRITRKFKIIHNFFCNIRHRLLRNGRPRIGL

SEQ ID NO: 32659 - protein, 1364 aa, Erynnis brizo
MKGTTRPRPQVPGGSSHFPDLDGSRAGTGSRGVYNLRVRKPRQTTTACIKDSELRYDTEQLSRTPSAESLFTTPISSPNFLEFPDRSRSSTITPVSVDVVQESTKVDKPAPTTDNKRARKRWSEDMNRFIWRNYLRITKIETINLRSYLPLLHQQFTENFPDVQATRQRIGDQRRAIVRNKLLPQDILNRIRTEVMDELTSSETASNSLHNSTQQPIITNTSQKSKMSWSDTLNETLIRCFYEVTDLGKNLTTYRKKLRNRFIEVCPQLAHLSEQRLSDQQRAIINNKYISDEKLLHIRKEIENNLYKNSPVLTPAHTVTEYTEPPLPDITFTSDISETETSPTTSTHTKNLDIHLQEKIKLEFDINLEKFKNSNPTTRPYIPKQKSSKKLTMIVEYINKNILPQILNPNQNFLELHTIIYTVAYTAATCNGTKIGINREQSCKEQQKPFWQKRLEDKIQLLRLEIGRLTQYIQGNRNKGVVRTVEKIKIKHKTHTQYENINTKLSEFLDTLKQKLSVASSRLKRYLVCTDRKRQNNAFKNNEKSFYRNLGTQSHNKNNKTPDSNTMREFWANIWEHPIEHDTDAEWIKENTVVTPKEEMEFEHIAIDTLVKVIRRTHNWKSPGTDNIHNFWYKKLTSTHPYIHRHLNSFLQHPDTMPAFVTEGITFMLPKDPNDSYNPAKYRPITCLQTIYKLITACISEAVYEHLEKHNILAEQQKGCRKNSQGCKEQLTIDSIVMNSAAKRKQNIYTMFIDYKKAYDTVPHSWLLHVLELYKIHPTLISFLNTTMITWQTSLKMKQDKHFITTDPIRIRRGIFQGDALSPLWFCLALNPLSDLLNQSNLGYTIHKSTIEGNLTHLMYMDDIKLFATTKEDLFELADITEKFSNHIHMEFGVDKCKILSVRKGKVEMNSYILESGQTIEPLDQFSTYKYLGFKQSTRIHHQTIKSEITKKFKYRLNTLLKTYLNSKNTVKAINTYAIPILTYSFGIIRWTKADLKKLQRVVSTHLTKHRKHHPRACTERLTLPRQEGGRGLIDIENLHNTQIATLRRYFYSKAEHSHIHKLVIEVDNKLTPLNLKNTQNRECVNDAQKKIETWAGKALHGRHRAHMCQEYVDKEKSNEWLKRGELFPETEGFMIAIQDETIVTRNYKKYIIKDPKENNDLCRHCHSAPETIQHITGGCRSLAQTDYKHRHDQVAAIIHQQLAYKFKLIPKMIQYYNYKPESALEDRNCKIYFDRTIITDKTIHFNRPDITIHDKINSKVYLVDVAIPNSHNIQNTISEKLHKYQELAIELKNKWNTQTVHIIPIVLSSTGIIPKSLLKSLETLNMPYYTLHMLQKATILNTCRITRKFLSSSTISSATFTIK

SEQ ID NO: 32660 - protein, 896 aa, Cycloglypha thrasibulus
MQGNRNKSILKTVARIKSKHEIHTQYDNSNRQLNEFLDTLKQKLNVASSRLRRYLACTERKRQNNAFKNNEKLFYRNLSTQSNSNNENNNTPDPNTIRDFWSNIWEHPVEHDKEADLIKEDKVVTPSDEMEFEKISLDTLLKVIRRTHNWKTPGTDNIHNFWYKKLTSTHPYILIHLNNFLKYPDTTPFFFTEGITFMLPKDCNDSCNPAKYRPITCLQTIYKLLTGCISEAVYDHLGKHNVLAEQQKGCRKNSQGCKEQLTLDSIAMSSAAAQKRNIYTMFIDYQKAYDTVPHSWLLHVLEMYKIHPIITSFLKTSIITWQTALKIKQNLTFSTTEPIKIKRGIFQGDSLSPLWFCLALNPLSDLLNQTNLGFRLNSSNVEGNLTHLMYMDDIKLFANTKNDLFQLADITQKFSHNIRMVFGVDKCRTLSVCKGKIELNNYILESEQSIEPLDQFSSYKYLGFKQSTQIHHNSIKSEITQKFKYRLNILLKTYLNAKNTIKAINSYAIPTLTYSFGIIRWTKADLKKLQRIINTHLTKYRKHHPRACTQRLTLPRQEGGRGLIDIENLHNTQITTLRNYFHSKAEHSPIHKLAVETDNRFTPLKLKNIHTQNNERISNISHKIDTWTRKALHGRHRAHMCQEYVDKEKSNEWLKRGELFPETEGFMIAIQDETIVTRNYKKYIIKDPKETNDSCRHCNSAPETIQHITGGCRALAQTDYKHRHDQVAGIIHQQLAYRFKLIQKMIQYYKYKPESVLENSNYKIYFDRTIITDKTIHCNRPDITIHNKNDNVVHLIDIAIPNSHNIQNTTSEKLHKYQDLAIELRNQWKVKTVHIIPIVLSSTGIIPKTLVKSLETLNLPTYTLHMIQKATILNTCRITRKFLTSSIISSATLAIK

SEQ ID NO: 32661 - protein, 1269 aa, Timochares trifasciata
MSVDVVQETTVDKLAPTTGNKCARKRWSEDMNRFIWRNYLRITKLETINLRSYLPLLQQQFSVNFPAMQATRQRIGDQRRAILRNKLISPETLNQIRSEVTAELNSCGSTSNTTDSMTDTQNLNRLCTSQKNKMTWSDSLNETLIRCFYEVTEVGKNLTAYRKKLRNRFIEVYPQLAHLSEQRLSDQQRAIINNKYISEEKLSYLKREIANTLHNNSDREDTEAPLLDITTTSNIRNEIESNQSLPTYINHLDIQLQEKIKLEFEVNFENFKNINPTCRPYIPKQKSSRKLAMIVEYINKNILPQLLNPNQNFTELQTIIYTVAYTAAICNGTKIGTNRDQHNSKKDLKPFWQKRLEGKIQSLRLDIGRLTQYIQGNRNKCITRTVAKIKSKHKIHSQYDITNRELNEFLDTLKQKLNVASSRLRRYLACTERKRQNNYFKNNEKLFYRNISKQSNSNNENNNTPDPNTIREFWANTWEHPVEHNSDIDWIQEDKVVVPKDEMEFEKISLNTLVKVIKRTHNWKTPGTDNIHNYWYKKLTSTHPYIHIHLNNFLQYPDTMPSFFTEGITFMLPKDCNDSYNPAKYRPITCLQTVYKILTGCISEVVYEHLTKHNILAEQQKGCRKNSQGCKEQLTLDAIAMSSAATQKRNIYTMFIDYQKAYDTVPHSWLLKVLDIYKIHPTIISFLNTSMITWQTSLKIKQNLNFITTEPIKIKRGIFQGDSLSPLWFCLALNPLSDLLNQTNLGFRINKSTVEGNLTHLMYMDDIKLFASTKNDLFQLADITQQFSNNIGMVFGVNKCKTLSVCKGKIELNSYILESQQSIEPLDQFSTYKYLGFKQSTRIHHNSIKSELTQKFKYRLNILLKTFLNSKNTIKAINSYAIPILTYSFGIIRWTKGDLQKLQRIINTHLTKFRKHHPRACTQRLTLPRQEGGRGLIDIENLHNTQVTTLRNYFYSKAESSHIHKLAIETDSRLTPLNLKNTNAQNSERITDVKEKIDMWTRKALHGRHRAHMCQEYVDKEKSNEWLKRGELFPETEGFMIAIQDETIVTRNYKKYIIKDPKETSDLCRHCNSAPETIQHITGGCRTLAQTDYKHRHDQVAAIIHQQLAFRYKLIPKMIQYYKYKPESVLENSSYKIYFDRTIITDKTIHCNRPDITIHDKINKTVYLVDVAIPNSHNIQNTTSEKLQKYQDLAIELRNQWKVQTIHIIPIVLSSTGIVPKTLVRSLDTLNMPTYTLHMIQKATILNTCRITRKFLTSSIISSATLAIK

SEQ ID NO: 32662 - protein, 1369 aa, Helias cama
MKGTTKPRPQVPGGPSHLPDPDGSRAGAGSRGVYNLRVRNPRQTTTARIKDSDLQYDKEQVSRTTSTESLFTTPILSPNSFELPDISRSSTISPVSVDVVQTTAVDKFAPTTGNIRARKRWSEDMNRFIWRRYLHITKVETINIRSYLPLLHQQFSENFPDMQATRQRIGDQRRSILRNNLLSQEILDQIRIEVMEELKSSETMPHASNHVNSTQHLNRPCMSQKSKMSWTDSLNETLMRCFYEVTDVGKNLTAYRKKLRNKFIELCPHLEHLSEQRLSDQQRAIVNNKYISEEKLKHIKEEIEKKLHNNSLVLTSVHTCTGHTEIPSLDTIITSNTRNERESIQSPLEYTQNLDIDLQEKIKIEFETNFERFKNLSPTSRPYIPKQKSSKQLTMIVEHINKNILSQLLSPDQNFLTLHTIIYTAAYTTATCNGTKIGTCRDQHKKQVKPSWQKRLESKIESLRFDIGHLTQYIQGNRKKSILKTVQKIKSTHKIHTQYESVNTDLKEFLDTLKQKLNAASSRLRRYLECTHRKRQNNAFKNNEKSFYRNLNTQSHSNNINNETPDPNTIREFWANIWEHPAEHDINADWIKEGKIVTPSSEMEFEHIPPDTLIKVIRRTHNWKTPGTDNIHNYWYKKLTSTHPYIHVHLNNFLQYPDTMPTFITEGTTFMLLKDPKDSYNPAKYRPITCLQTIYKLLTGCISEAVYEHLDRHNILAEQQKGCRKNSQGCKEQLTIDSIAMASAAVQKRNIYTMFIDYKKAYDTIPHSWLLQILEIYKIHPTITSFLNKCMTAWQTSLTIKHDTNFITTEPIKIKRGIFQGDSLSPLWFCLALNPLSNLLNNTNLGFRLSNNTIEGNLTHLMYMDDIKLFANTKDDLYQLADITQNFSNDIRMEFGVDKCKTLSVHKGKVEMNNYLLETGQTIEPLDQFSTYKYLGFKQSTRIHHNSIKAEITQKFKYRLNILLKTFLNSKNVIKAINTFAIPILTYSFGIIRWTKSDLKKLQRNISTLLTKYRKHHPRSCTERLTLPRSEGGRGLIDIENLHNSQIVTLKHYFYSKSEHSPIHKIAIEVDNRLTPLNLRNTQTQNDHYMNKTQEKIDTWAKKALHGRHRAHMCQEYVDKEKSNEWLKRGELFPETEGFMTAIQDETIVTRNYKKYIIKDPKVTSDLCRHCNSAPETIQHITGGCRLLAQTDYKHRHDQVAAIIHQQLAYRFKLIPKMIQYYKYKPESVLEDRNYKIYYDRSIITDKTIHFNRPDITIHDKINKLVYLIDVAVPNSHNIQNTTSEKLHKYQDLAIELKNQWKVQTIHIIPIVLSSTGIIPKTLLKSLNTLNMPSYTLHMLQKATILNTCRITRKFLTSSTISSATLAIK

SEQ ID NO: 32663 - protein, 1385 aa, Chiomara georgina
MKGTTKPRPQVPGGPRHLPDLDGSRAGTGSRGAYNLRVRNPRQTTSARIMDSDLRNDKEQLTRTPSSETLLTTPISSPNFLELPSTSSSSTINPVPLDVVQKTSVDKFAPTTGNKGARKRWSEDMNRFIWRNYLQITKIETINLRSYLPLLHQRFSDNFPDMQATRQRIGDQRRAILRSKLLSQEKLDQIRNEVMIDLKSDESILNSTEHINSTQQLVTNRSSMSQKNKMTWSDALNETLLRCFYEVTDLGNNLTAYRKKLRNRFIEFYPQLSHLSEQRLSDQQRAIINNKYISEEKLLQIKREVEKDLYSKPSELTAEHTEIEFPETPLVNIAIASNVESELEPNQTPSTLTQHLDIEIDLQDTHTQRLDIDLQDKIKSLFVINHEKFKNIDPTSRPYIPKQKSSRKLTMIVEYINKNILPDLLDSNLKFLELHTIIYTVAYTSAICNGAKIGTNKDQNNKKLLKPFWQKRLEDKIQSLRVDIGRLTQYIQGNKNKNILKTVEKIKNKYEIHAQYDNTNRQLNEFLDTLKQKLNVASSRLRRYLACTERKRQNNAFKNNEKLFYRNLGSHSNNTNKNNKTPDPNSIRDFWANIWENPVEHDKDADWIKEGKIIVPKDEMEFEKISLDTLVKVIRRTHNWKTPGTDNIHNFWYKKLTSTHPYIHTHFNRFLRYPDIMPTFFTEGITFMLPKDPDDSCNAAKYRPITCLQTIYKLLTGCISEAVYKHLTKHNILAEQQKGCRKNSQGCKEQLTLDSIAMGSAVTKNRNIYTMFIDYQKAYDTVPHSWLLQVLNIYKIHPTITSFLNTSMITWQTSLKIKQDLNFITTEPIKINRGIFQGDSLSPLWFCLALNPLSDLLNQTNLGYQMNNSTLEGNLTHLMYMDDIKLFSSTKRDLFQLADITQTFSSNIRMVFGVDKCKTLSVCQGKIELNNYVLESEQSIEPLNQFSSYKYLGFKQSTQIHHNTIKSEITHKFKYRLHILLKTYLNSKNTIKAINSYAIPILTYSFGITRWTKADLNKLQRIINVHLTKYRKHHPRSCTQRLTLPRQEGGRGLIDIKNLHNTQIATLRKYFYSKAEESHIHKLAIETDNRLTPLNLKNTNTQNNEYINNTQNKIDLWTRKALHGRHRAHMCQEYVDKEKSNEWLKRGELFPETEGFMIAIQDETIVTRNYQKYIIKDPKVNDLCRHCNSATETIQHITGGCKSLAQTDYKHRHDQVAAIIHQQLAYRFKLIPKMIQYYKYKPESVLENLNYKIYFDRTIMTDKTIHFNRPDITIHDKVNNVVYLIDVAIPNSHNIQNTTSAKLHKYQDLAIELKNQWRVQTIHIIPIVLSSTGVIPKTLVRSLETLNLPTYTLHMLQKAVILNTCRITRKFLTSSIISSATLAIK

SEQ ID NO: 32664 - protein, 1142 aa, Gorgythion begga
MTWSDALNETLIRCFYEVTDLGKNLTAYRKNLRKKFIEVYPQLSHLSEQRLSDQQRAIINNKYISEEKLQYIRKEIEKGLHSNSSVFTSEHTFTEYTETPLVNIETASNVESEKEPNQTSVINIEPLDTQLQYKIKLQFDINFEKFKNTDPTSRPYIPKQKSSRKLAMIVEFINKNILPELLSPDLNFALLQTIIYTVAYTAATCNGTQIGTNRDQNSKKQLKPSWQKRLEGKIQSLRLDIGRLTQYIQGNKHKNILKTVAKIKNKYEIHTQYDNTNRQLNEFLDTLKQKLNVASSRLRRYLACTERKRQNNSFKNNEKLFYRNLSTQSKGHNKNNETLDPNIIRDYWANIWQHPVEHDRNADWIKEGKVAAPSDEMEFEKISLDTLIKVIRRSHNWKTPGTDNIHNFWYKKLTSTHPYILIHLNNFLRYPDTMPVFFTEGITFMLPKDPNDSYNPEKYRPITCLQTIYKLLTGCISEAVYEHLTKHKILAEQQKGCRKNSQGCKEQLTLDSIAMSSAAAQNRNIYTMFIDYQKAYDTVPHSWLLQVLDIYKIHPTITSFLNTAMLTWQTSLKIKQDLHFITTEPIKVKRGIFQGDSLSPLWFCIALNPLSDLLNQTNLGYRMNQSTSEGNLTHLMYMDDIKLFASTKKDLFQLADITQVFSCSIRMMFGVDKCKTLSVCKGEIEMNSYTLDTEQSIEPLDQFSSYKYLGFKQSTRIHHNTIKSEIIHKFKYRLNTLLKTFLNSKNIIKAINSYAIPILTYSFGIIRWTKADLKKLQRIINIHLTKYRKHHPRACTQRLTLPRQEGGRGLIDIENLYNTQIATLKHYFYSKAEHSRIHKLAVKTDNKFTPLNLKNKKTLNTERTNNTQDKIDMWSRKALHGRHRAHMCQEYVDKEKSNEWLKRGELFPETEGFMIAIQDETIVTRNYQKYIIKDTKVNDLCRHCNSAPETIQHITGGCKSLAQTDYKHRHDQVAAIIHQQLAYRFKLIQKMIQYYKYKPESVLENRNFKIYFDRTIITDKTIHFNRPDITIHDKVKNVVYLVDVAIPNSHNIQNTTSEKLHKYQDLAIVLKNQWKVKTVHIIPIVLSSTGVIPKTLVRSLETLDLPTYTLHMIQKAVILNTCRITRKFLTSSVISSATLAIK

SEQ ID NO: 32665 - protein, 1413 aa, Timochares trifasciata
MYNNNNNNPPEGSPWRGGGAYGENTQLTYAQPIQWWFQILTPLSPTNDPKTKEDMKSTTKPRPQVPGGPSHLPDPDGSRAGTGSRGVYNLRVRTHRQTTTACIKDSDLQSDKEQKSRTPSTENIFESTDMSRSSTISPVSVDVVQETTVDKLAPTTGNTRARKRWSEDMNRFIWRNYLHITKIETINLRSYLPLLHQQFSENFPNMQVTRQRIGDQRRTILRNKLLSQEILDQIRYEVIEELKTSETTPYTNQFLNSTQYSDKPSTSQKSKMSWTDSLNETLIRCFYEVTELGKNLTTYRKKMRNKFIELCPHLAHLSEQRLSDQQRAIVNNKYISEEKLTHIKREIQQKLHNNSSVLTSMHTGSEYIDIPSPDITITSNTRNERESTQTPLGYAHDLDVHLQEKIKLDFEINFERFKNLSPTSRPYIPKQKSSKQLTMIVEFINKNILPQLLGAEQNFLTLQTVIYTVAYTAVTCNGTKIGTCRDPKNEQLKPSWQIRLENKIESLRLEIGRLTQYIQGNRNKCILKTVQKIKRTHMIHTQHENINRNLKEFLDTLKQKLNAASSRLKRYLVCTQRKRQNNAFKYNEKSFYRNLNTQSHKDNKRNETPHPNTIRDFWANIWEHPVEHDLDANWIKEGKIVIPSCEMEFEHISLDTLVKVIRRTHNWKTPGTDNIHNYWYKKLTSTHPYIHAHLNNFLQYPDTMPTFITEGTTFMLLKDPNDSYNPAKYRPITCLQTIYKLLTGCISEAVYEHLAKYSILAEQQKGCRKNSQGCKEQLTIDSIAMATAAAQKRNIYTMFIDYQKAYDTIPHSWLRQILEIYKIHPMITSCFNTSMTTWQTSLTIKHGTNFITTEPIKIKRGIFQGDSLSPLWFCLALNPLSDLLNQTNLGFRFANNTVEGNITHLMYMDDIKLFANTKDDLFQLADISQKFSNDIKMEFGVDKCKTLSVYKGKVEMNNYLLETGQTIEPLDQFSTYKYLGFKQSTRIHHNSIKAEIIQKFKYRINILLKTYLNSKNTIKAINTFAIPILTYSFGIIRWTKTDLKKLRRIISTHLTKYRKHHPRSCTERLTLPRLEGGRGLKDIENLHNTQIATLKHYFYAKAEHSPIHKFAVQADNKLTPLNLGNRQTQNNHTINNTQEKIETWSKKALHGRHRAHMCQEYVDKEKSNEWLKRGELFPETEGFMIAIQDETIVTRNYKKYIIKDPKETSDLCRHCNSAPETIQHITGGCRSLAQTDYKYRHDQVAAIIHQQLAYRFKLIPKMIQYYKYKPESILENKNCKVYYDRTIITDKTIHFNRPDITVHDKINKLVYLIDVAIPNSHNVQKTTSEKLHKYQDLAIELRNQWKVQTIHIIPIVLSSTGVIPKTLVKSLDTLNMPYYILRMLQKATILNTCRITRKFLTSSTISAATLAIK

SEQ ID NO: 32666 - protein, 1247 aa, Timochares trifasciata
MNSFIWRNYLRITKIETINLRSYLPLLHQQFSDNFPSMQATRQRIGDQRRAILRNQLLSQDTLNQIRNEVREELNLSESLPNTSNLVNSIQRLNKSSTPPKNKMVWSDSLNETLIRCFYEVTDLGKNLTAYRKKMKKRFTEECPQLAHLSEQRLSDQQRAIINNKYISEENLLLIRREVEKNSHNIFSIATPIHNATEYTETPSLDIITTPNIRSEIEPNRTPCTHIKSLDRHLQEKIELEFEANFEVFKNINPTCRPYIPKQKSSRNLSMIVDYINKNILPQLLSIDQNFTTLHTIIYTVAYTAATCNGMKIGAVNNQNSRKNSKPFWQKRLEDKIQSLRLDIGRLTQYIKGNRNKCIVKTVIKIKSKHNIHTQYENNNTQLNEYLDTLKQKLNVASNRLKRYLVCTKRKQQNSTFENNEKSFYRNLTQINNKSHNKNIGTPDTDAVREFWANIWEHPVEHETNAEWIKGDKIVTPNIGMEFEQIPLDILVNVIKRTHNWKTAGTDNIHNFWYKKLTSTHPYIHSHLNNFLQFPDTMPSFITEGTTFMLLKDPNDSYNPAKYRPITCLQTIYKLLTGCISEAIYKHLSEQNILAEQQKGCRKNSQGCKEQLTLDSIAMGSAAAQKRNIYTMFVDYKKAYDTIPHSWLLQVLEIYKIHPKIISFLNASMKSWQTSLKIKKDTNFITSEPIKIRRGIFQGDSLSPLWFCLALNPLSDLLNQTNLGFKLKNDVVEGNLTHLMYMDDIKLFANTKDDLFQLADITQKFSNNIHMEFGVEKCKTLSVRKGKIEKNNYITEAGQSIEPLDQFSTYKYLGFKQSTRIHHSSIKSEITQKFKFRLNIILKTHLNSKNTIKAINTYAIPLLTYSFGIIRWTKTDLKKLKRIISSHLTKYRKHHPRACTERLTLPRQEGGRGLIDIENLHNTQVATMKQYFYSKAEQSNIHKFAMEVDNRYTPLNLKNTQTQNKQRIIDTHDKIETWARKALHGRHRAHMCQEYVDKEKSNEWLKRGELFPETEGFMIAIQDETIVTRNYKKYIIKDRKQTNDLCRHCNSAPETIQHITGGCKSLAQTDYKHRHDQVAAIIHQQLACRFKLKQNMIQYYKYKPETVLEDKNYKIYFDRTIITDKTIHYNRPDITVHDKINKTVYLIDVAIPNSHNIQTTTSEKLHKYQELAIELRNQWKAQTIHIIPIVLSSTGIIPKSLIKSLEILNMPFYTLHMIQKATILNTCRITRKFLSSSIISSATLAIK

SEQ ID NO: 32667 - protein, 1372 aa, Cycloglypha thrasibulus
MKGTTKPRPQVPGGPSNLPDPDGSRAGTGSRGVYNLRVRNPRQTTTARIKDSDLQYDKEQVSRTSPSESLFTTPTSSPNTFELPNISRSSTISLVSVDVVQQTAVDKLAPTTGSKRARKRWSEDMNRFIWRNYLHITKIETINLRSYLPLLHQQFSEKFPDMQATRQRIGDQRRTILRNKLLSEEILDQIRTEVLEELKSSETTQHTRTPHHLNSIQHSNNPCTSQKSKMSWTDTLNETLMRCFYEVTDLGKNLTAYRKRLRKKFIELCPHLEHLSEQRLSDQQRAIVNNNYISEEKLIHIKRELEKKLHNNSSVLTSMHTSTEYTETPSLDTTVTSNTRNERESAQSPIGYTQNLDIHLQEKIRLEFETNFERFINTSPTSRPYIPKQKSSKQLAMIVAYINKNILPHLLSPDQNFLTLQTIIYTAAYTTVTCNGTKIGTCRDQNSIKKLKPSWQKRLERKIESLRLDIGRLTQYILGNRNKCILKTVQKIKTTYMIHTQHENFNTKLNEFLDTLKLKLNAASSRLRRYLECTQRKRQNNAFKNNEKSFYRNLTTQSHCNNKNNETPDSTTIREFWANIWECPVQHDIHADWIKEGKIVTPNSEMEFEHIPPDTLVKVIRRTHNWKTPGTDNIHNYWYKKLTSTHPYIHNHLNNFLQYPDTMPSFITEGTTFMLLKDPKDSCNPAKYRPITCLQTIYKLLTGCISEAVYEHLAKYDILAEQQKGCRKNSQGCKEQLTIDSIAMTTASVQKRNVYTMFIDYTKAYDTIPHSWLLQILEIYKIHPTITSFLNKCMTTWQTSLTIKQDTNFITTEPIKIKRGIFQGDSLSPLWFCLALNPLSDFLNQTNLGFRFNTNTIEGNLTHLMYMDDIKLFANNKDDLFQLADITQKFSTDIHMEFGVDKCKTLSIYKGKVEMNNYLLETGQTIEPLDQFSTYKYLVFKQSTRIHHNSIKAEIIQKFKYRLNILLKTFLNSKNLIKAINTFAIPILTYSFGIIRWTKTDLKKLRRIISTHLTKYRKHHPRSCTERLTLPRSEGGRGLIDIENLHKTQIATLTHYFHSKSELSLIHKFAIEADNKLTPLNLKNTQIQNNQHNDNTQNKIETWTKKVLHGRHRALMCQEYVDKEKSNEWLKRGELFPETEGFMIAIQDETIVTRNYKKYIIKDPKETSDLCRHCNSAPETIQHITGGCRSLAQTDYKHRHDQVAAIIHQQLAYRFKLLPKMIQYYKYKPESVLEDRNYKIYYDRSIITDKTIHFNRPDITIHDKINKLVYLIDVAIPNSHNIQNTTSEKLHKYQDLAIELKNQWKVQTIHIIPIVLSSTGLIPKNLLKSLDTLNMPSYILHMLQKATILNTCRITRKFLTSSTISSATLTIK

SEQ ID NO: 32668 - protein, 1304 aa, Cycloglypha thrasibulus
MRDMTDTTMPRPQVPNLFELPGNSRSSTATPMSVDVVQETTVDKLAPTIGNKRARKRWSEDMNRFIWRNYLRITKIETINLRSYLPSLYQQFLENFPDMQVTRQRIGHQRRAILRNKLLPQTTLNQIRDEITEELNLSESLPQTPHHMNSTQQCTSQKNKMSWSDSLNETLIRCFYEVTDLGKNLTAYRKKLKNRFIEACPQLAHLSEQRLSDQQRAIINNKYLSDENLRRIRTEVENYLHNSSSSVTPIHAVTEITETLSLDTTITSNIRSETESNQTTSKHIKNIDIHLQEKIDFEFEINFENFKNINPTSRPYIPKLKSSRNLAIIVDYINKNIVPKLLSPDQNFTTLHTIIYTVAYTAATCNGTKIGTMKNQNSKKHIKPFWQKRLEDKIQSLRSDIGRLTQYIQGNRNKCVLKSVAKIRRKHKIHTQYENTNRDCNEYLDTLKQKLNVASSRLRRYLACTERKRQNSSFKNNEKSFYRNLTQIESHNNNKNNETPDPTAMRKFWADIWEHPVEHDMNAGWIKGGKVVTPDNEMEFEHIPLDILVKVIKRTHNWKTAGTDNIHNFWYKKLTSIHPYIHIHLNNFLQYPNTMPHFITEGATFLLPKDPTDLLNPAKYRPITCLQTIYKLLTGCISEAVYEHLTKQNILAEQQKGCRKNSQGCKEQLTLDSIAMSSAAAQKRNIYTMFIDYQKAYDTIPHSWLLQVLEIYKIHPKIISFLNTSMTTWQTSLKIKQDTNFIISEPIKIRRGIFQGDSLSPLWFCLALNPLSGLLNQTNLGFRLKNNTKEGNLTHLMYMDDIKLFANTKEDLFQLADITQMFSNDIHMEFGVDKCKTLSVSKGKFEMNNYITETGQSIEPLDQFSTYKYLGFKQSTRIHHNSIKSEIIQKFKHRLNIILKTHLNSVNTIKAINTYAIPILTYSFGIIRWTKTDLTKLRRIISTYLTKYRKHHPKACKERLTLPRQEGGRGLIDIDILHNTQIETLRHYFYSKAEQSIIHNFAVELDSKFTPLNLKNTQKQNTKCIHDTQNKIETWAKKTLHGRHRAHMCQGYVDKEKSNEWLKRGELFPETEGFMIAIQDETIVTRNYKKYIIKDPKEMNDLCRHCNSSQETIQHITGGCKSLAQTDYKHRHDQVAAIIHQQLAYRFKLIPKMIQYYKYKPESVLEDKNYKIYFDRTIITDKTIHYNRPDITVHDKINKVVFLIDVAIPNSHNIQNTTSEKLHKYQELAIELQNQWRVQTVHIVPIVLSSTGIIPKSLLKSLETLNMPTYTLHMLQKATILNTCRITRKFLSSSTISSATLAIK

SEQ ID NO: 32669 - protein, 1353 aa, Telemiades fides
MESKTKPRPQVPGGPSHCPDSDGSRASTGSRGVYNLRARKPRQTTKACSKDSDLQTDYEESTRSSFPSPTSSPNPLNTCLRSSTTTPESVDVVQMTEVDILAPTTGNKRARKRWTEDMNKFIWRTYLHITQIETINLKSYLHTLHHQFTLFFPTMEATRQRIGDQRRAIIRNKLLSQETLTQLKAEVIKEIEIEASKGIEANNTQNANTCQTTQRQKMSWSDELNETLIKCFYEVTELGKNLTAYRKKLRNRFIEVCPQFSHLSEQRISDQQRAIINNKYLTDEKLKCIKSEVQKCVTKVTQETFYASTQSESITQIDLHNIERETSQTQFIHTDLNITHTYTQCLDRQMQDKIKSEFTNNFELFKDTDPTSRPYIPKQKASKRLAMIVAYINENILPHHLKTAHDFKTLHTIIYSGAVTAVICNGTRIGTVGKDKKQHLKPKWQQRLENKVTSIRSDIGRLTQYINGNRNKRVIKTVEKIKIKYQIHARYENANNKLAEFLDTLKQKLSVASSRLKRYSTCTERKRQNKSFINNEKSFYRNLNTTQLNTNNVTEVPTPDVLRQYWANIWENPAQHNNTADWLPGNSQYTSNINMEFEDIPINTLMNVIKRTHNWKAPGTDNIHNFWYKKFTSTHSYIHDSLNKFLKFPEEMPTFITQGVTFMLPKDTNDTSDPAKYRPITCLQTIYKILTSCVSELLNEHLLKHKILAEEQKGCRKNSKGCKEQLTIDAIAMNNAVTNKRNIYTMFIDYQKAYDSIPHSWLIQILQIYKIHPTIISFLQATMQKWQTKLKINFDRQLITTEPIQIQRGIFQGDALSPLWFCLALNPLSELLNNTNLGFNFNNDIIVGGALTHLMYMDDIKLFAETKDELFQLADIIQQFSRDICMNFGVDKCKILSINKGKIENNSYMLNNGTLVESLDQYNMYKYLGFKQSKQINHKEIKLQLIKQFKHRLNKLLKTCLNSKNIIKAINTYAIPSLTYSFGIIRWSKTDLKKLQRTVNTHLTRYRKHHPKACVQRLTLPRHEGGRGLIDIKNLHNTQITSLRHYFHSKAEHTSLHKQVSQADDRLTPLNLKNRQTQAIEQITNTKEKIATWAGKVLHGRHRAQLCQQYVDKEKSNEWLRRGELFPETEGFMIAIQDETIVTRNYKKYIIKDQRQTTDLCRHCNAASETIQHITGGCKSLAQTDYKHRHDQVAAIIHQQLAYRYHLVPKMIPYYKYKPESVLEDHKYKMYFDRTIMTDKTIYFNRPDITIHDKVNKTTFLIDIAIPNSNNIQNTTSEKLSKYQDLAIELKTQWKLDTVKIIPIVLSSTGLIPKTLVKSLDTLNMPFYTLQMIQKSVSQCLISIKNRRIDRAF

SEQ ID NO: 32670 - protein, 1370 aa, Mimia chiapaensis
MKGTTRPRPQVPGGPSSLPDSDGCRAGTGSRGVYNLRARKPRQTTKASLKDSDMQYDKEQPSSPSSIGSLYQTPGSSPSEVSTTSRSSSITPTYVNVVQETKVDNPAPTMYNKRARKRWSDEMNRFIWRTYLHITRIETINLKSYLASLHQQFSEQFPDMQATRQRVGDQRRIILRNNLLSLDVLNQIKSEVIVELEATQEIPHASTLQANYTKNTNTTHTLEKGKMSWSDALNKTLIRCFYEVTDLGNNLTAYRKKLRNKFIEIYPHLSHLSEQRISDQQRAILNNKYISDEELLVIRKEIESNQCINNTLIVTQHHTEIDTLLYDNIAISQDEHETERLEHTEPSNTQIITTKNYLESLDTRMQEKLQTEFADNLNNFIDTNPTSRPYIPKQKTSKKLAMIVAYINNNVLPKLLNSDQDFITLQTIVYTAAYTAAICNGTKIGTNRERSRKHSKPSWQKRLENKISMLRADIGRLTQYIQGNRNRCILRTVENIKIKYQTHTQYENKNTELKEFLDTLKQKLNVASNRLKRYLTCTERKSQNNRFQNNEKSFYRSLNTQYNSTHINNENLNTPAANTLREFWANIWEHPVEHNTAADWIDTSTPKPNMEFKHIPMDTFVKVIKNTHNWKAPGTDNIHNFWYKKFTTTHVYIYNNLNTFLQFPETMPTYITEGVTFMLPKDFNDTHNPAKYRPITCLQTIYKLLTGCISELLHEHLIKHNILAEQQKGCRKNSQGCKEQLTIDSIAMSTAATQKRDIHTMFIDYQKAYDSIPHSWLIQTLHVYKIHPTIISFLKTSMKKWYTSLKIKQGGTHFITTEPIHIKRGIFQGDSLSPLWFCLALNPLSHLLNDSDLGFKLNECALDGNLTHLMYMDDIKLFANTKEELFQLADITQKFSKNIHMEFGVDKCKIVSIHNGKIEQNSYILESGESVEPLDQYSTYKYLGFKQSRRIHHASIKLEIIQKFKFRLNLTLKTYLNSKNNIKAINTYAIPILTYSFGIIRWTKTDLKKLQRIISTHLTKYRKHHPKACIQRLTLPRKEGGRGLIDIENLHNTQIATLRRYFQSKVEQSSLHKYATEADNKFTPLNLKCKQTQANERIINLQEKIETWTTKVLHGRHRAHLSQQYVDKEKSNEWLKRGELFPETEGFMIAIQDETIVTRNYKKYIMKDPNQSNDLCRHCNAAPETIQHVTGGCRSLAQTDYKHRHDQVAAIIHQQLAYRYKLIPKMVQYYKYKPESVLEDKRFRIYWDRTIITDKTIHFNRPDITVHDKINKTVYIIDVAIPNSHNIQNTTSEKLNKYQDLAIAIRTQWKVQTIHIIPIVISSTGIIPKTLLRSLNTLGMPTYTLHMLQKATILNTCRITRKFLTSSTIS

SEQ ID NO: 32671 - protein, 1363 aa, Helias cama
MKSTTRPRPQVPGGSSHLSDLDGSRTGTGSRGVYNLRVRNPRQTTLACITDSDLQNDKEQLSRTPSMESLFTTPVSSPNSFEQPDISRSSTITPVSVDVVQETTVDRLAPTTGNKRARKRWSEDMNRFIWRNYLHITKLETTNLRSYLPILHQQFSVNFAGMEATRQRIGDQRRAILRNKLLSQETLDQIRTEVMAELNSCESIPNTADTENNTQNLNRSCTSQKSKMTWSDALNETLIKCFYEVTDLGKNLTAYRKKLKNRFIEVCPQFAHLSEQRLSDQQRAIINNKYISEEKLLIIKKEIEKNLYHYSSVTEYIEAPSIDITVTPDIRSEVESNQTPSTHINHLDAHLQEKIKLEFENNFKKFKNTSPTSRPYIPKQKSSRKLIMIVEYINKNILPKLLSPNQNFIELQTIIYTAGYTVATCNGTKIGSIRDQDNSKKDFKPFWQKRLEDKIQSLRLDIGRLTQYMQGNRNKNILKTVAKIKSKYEIHTQYDNTNRELNEFLDTLKQKLNVASSRLRRYLVCTERKSQNIAFKNNEKLFYRNLSTQKNSNNENTNKPDPNTMRDFWANVWEHPVEYDKDADWIKEDKVVTPSNEMEFEKISLDTLLKVIRKTHNWKTPGTDNIHNFWYKKLTVTHPYIFTHLNNFLKYPDTMPTFFTEGITFMLPKDCSDLYNPAKYRPITCLQTIYKLLTGCISEAVYEHLRKHNILAEQQKGCRKNSQGCKEQLTLDSIAMSSATAQKRDIYTMFIDYQKAYDTVPHSWLLRVLELYKIHPTITSFLNTSIVTWKTSLKIKQELNFITTEAIKIKRGIFQGDSLSPLWFCLALNPLSDLLNQTNLGFRMNSNKVEGNLTHLMYMDDIKLFANTKNDLFELADITQKFSYNIRMVFGVDKCKILSVCKGKIELNNYILESKQSIEPLDQFSTYKYLGFKQSTRIHHNSIKSEIIQKFKHRISIILKTFLNSKNTIKAINSYAIPILTYSFGIIRWTKADLKKLQRIINTHLTKFRKHHPRACTQRLTLPRQEGGRGLIDIENLHNMQITTLRNYFYSKADHSPIHKLAVETDNRFTPLKLSTNTHNNESISNTSEKIEMWTKKALHGRHRAHMCQEYVDKEKSNEWLKRGELFPETEGFMIAIQDETIVTRNYKKYIIRDPKETNDLCRHCNSAPETIQHITGGCRSLAQTDYKHRHDQVAAIIHQQLAHRFKLIQKMIQYYKYKPESVLENSNYKIYFDRTIITDKTIHFNRPDITIHDKINKIVYLVDIAIPNSHNIQNTTSEKLHKYQDLAIELRNQWKVQTIHIIPIVLSSTGIIPKTLVKSLETLNLPTYTLHMLQKATILNTCRITRKFLTSSIISSATLAIK

SEQ ID NO: 32672 - protein, 1376 aa, Chiomara georgina
MNRKTKPRPQVPGGPSHLPDFDGSRAGTGSRGVYNLRVRKPRQTTTACIKDSDFQYDMEKPSSSPTDSLFQTPVSSPELYEPLSSSRSSSITSMSIDVVQETEVNNLVPTIDNKRARKRWSDEMNRFIWRTYLRITQIETINLNSYLSSLHHEFSQHYPSMQATKQRVGDQRRAILRNKYLSEDILNQIKMEVTSELDKPQSGSQLDTYINATRKNNLYSIPQSQKMSWSNTLNETLIRCFYEVTELGKNMTAYRKNLRNRFIDMCPHLAHLSEQRISDQQRAILNNKYIADEKLLQIKNEVKNSLSQHSVEDHTQVSGLDKNLSNSCTDIGTIGEMENEEVDLSGLNSNNVQKGPECIEQQLQDKLKAHFDETFNKFRDINPTAREYIPKQKTSKRFSLIVAYIDDNILPEYLESTQSFLTLQTLIYTAAYTAATFNGTKLGTSKINKPHESHTPNWQRRLENKILMFRSDIGRLTQYINGNRSKNIVKIVDKIKAKYQIHTQHENTNTKVEDFLDTLKQKLNAASSRLKRYLTCTARKQQNKNFACNEKKFYRNLALSHTGPKISDLPAPDNLRDFWANIWENPVEHNKMADWIKTTSEAWQLNSEMEYTHIPLEVFIKIIKHTQNWKAPGSDNIHNFWYKKLRSTHSHIYAYLNTFLEYPDSMPKYITDGITFMLPKDLNETDNAAKYRPITCLQTIYKILSGCISEMIYKHLTKNNILAEQQKGCRKNSQGCKEQLTIDSIVMNMAANKKRDLYTMFIDYQKAYDSVPHSWLIHTLHNYKIHPNIIIFLEKTMQKWQTVLKIRQGSISLTTEPIQIKRGIFQGDALSPLWFCLALNPLSELLNKTNLGYKLDNSNDINENLTHLMYMDDIKLFSDTKDNLFQLADITQNFSDDIRMELGVDKCKTLSITQGKIEHNSYILKSGKIILPIDQFSTYKYLGFNQSRRIHHNSIKEDLTNKFRYRLNLILKTYLNSRHTIKAINTYAIPILTYSFGIIRWNRADLEKLQRIISTHLTKFRSHHPRACTQRLTLPRHEGGRGLIDIRNLHNTQVAKLRSYFHSKAEMVNLYKHIIQADNKLTPLNLKDIQLQNNENITIPQDKITAWSGKVLHGRHRAHLCQQHVDKEMSNEWLKRGELFPETEGFMIAIQDETIVTRNYRKYIIKDPLQTSDLCRHCNAASETIQHITGGCRSLAQSGYKHRHDQVACIIHQQLAHRYKLIGKMVPYYKYRPESVLENKQCKIYWDRTIITDKTIHFNRPDITVLDKTTHKVYLIDIAIPNSHNLQNTTSEKLSKYQDLAIELRRQWKAQTIHIIPIVLSSTGVVPKTLVQSLHTLNMPSYTLNMIQKASILNTCRITRKFLTSSTISSATLEID

SEQ ID NO: 32673 - protein, 1312 aa, Racta chiria
MAMRLRNRQIIPRAGPRERESRPEPSGSGCPNVYGGGNVSLLSAQPSAVAENIIPHNSSPSSLLNTSPNESLFPSLNSSPSRFLYSDSTSQSSESVDVVQEADADNAAPTAGHKRARKRWTEEMNKFIWRTYLKITQIETVNQKSYLTSLHQQFTTQFPSMRVTRQRVGDQRRAIIRNMLLSHEILTKIKADITLEISDTTTRPQTFSESQNTQNMYHMNKRQKMTWTNSLNETLIKCFYEVTNVGRNLTSYRRSLRLKFIDLCPQLSHLSEQRISDQQRAIINNKYIPDERLKKIREEVEKSLDNNTSTEYLSGYTDLQLLLPTETRTLQIGQQMVSEEPELPHTHTFTHSSHNLTENLSRDLELQVWDKLEAEFIANLERFINSNPVCRPYIPKQKSTKKLAIIISYINENILPKHLSVDQDFITVQTIIYTAAFTAATFNGTKIETNVENTRPKCKPPWQKRLEDKIQMLRAEIGRLTQYIQGNRKKRIVKTVENIKIKYKNHSKYENNNTELSEYLDTLKQKLNATSNRFKRYLTCSDRKQQNKNFINNEKMFYRNLNTVHTHSNKQLEMPTPEALHKFWVNIWESPVQHNTNAEWIGRCSQIACEEMAFEQVPFDTFFNVLKRTHNWKAPGSDHIHNYWYKKFTTAHIHLYSHLNKFMLYPDTIPTYMTHGITYMSPKDQNYTKDPSKYRPITCLQTIYKILTACVSELIYEHITHYNILAEQQKGCRKNSQGCKEQLTIDAVVMNIAAKQKKNIHTMFIDYRKAYDSIPHSWLIQVLQIYKIHPIIITFLQKCMSQWQTALRIKLRNNCVVTDPISIQRGIFQGDALSPLWFCLALNPLSQLLNESNIGFSINNNTDTDDATLTHLMYMDDIKLYGSTKKQLFQLADITQNFSHDVQMEFGVDKCKILSVQKGKIVNNNYYTLQTGDQIEPMTQHSVYKYLGFQQSRQIQHNKIKLEIRKKFENRLNLILKTYLNSKNTIKAINTYAIPVLTYSFGIIRWSRTDLKKLQRTINTHLTKYRKHHPKACTQRLTLSRQEGGRGLIDIGNLHNSQISILRRYFHSKAELVSLHRHITESDNKLTPLNLKIKQTQTNEQIITTQEKTSTWQGKALHGRHRTQICQQHIDKEMSNEWLKKGELFPETEGFMVAIQDETIVTRNYKKYIIRDPLQTNDLCRHCSAASETIQHITGGCKSLAQTDYKHRHDQVAAIVHQQLAFRYKLIQKTITYYKYKPESVLQNSNYKIYWDRTIVTDKTIYANRPDITVHDKSNKIIYIIDIAIPNSHNIQSTISEKLSNYRDLAIELREQ

SEQ ID NO: 32674 - protein, 1446 aa, Thymelicus lineola
MEHRLRSKRIGPLPGGNRRGTPGADAGCFSMRTVSGEELSRRAPSGSPEHITANFTSDIANLNSSALIAKPNSPSTSSHTSSSMSSRHRKSFILPTKTTSQEGRTGLRSVYNLRPKKPCQTKSTLHGENFDHLQHDIGSLSTSPSSSLFPSPNSSPNHFEYFDTKSLSSESVDVVQAAEADNIAPIADHKCARKRWSEEMNRFIWRTYLKITRIETVNQKSYLSSLHQEFVNHFPTMQVSRQRIGDQRRAIIRNKLLSQEILNQIKAEVTLEIDNNITVNETQLTQNIDMNPTSQRRKMTWTDSLNETLIKCFYEVTDMGKNLTAYRRSLRLKFIDLCPELSHLSEQRISDQQRAIINNKYIPDERLKKIREEVEKTLYNNNRLIEHLSVQADLEPPLPTVARVTQSEQQIEGELESFTDLPHFIAEKENQLEIEVQEKVDAEFKKNLQRFLNSDPECRPYIPKQKTSKKFAMLISYINKHILPKHIITNQDFSTFQTIIYTAAFTAAICNGTKIGMTGEQIKIKCKPAWQKRLEDKIQLLRSQIGRLTQYIQGNRNKRIIKTVDVIKIKYQIHATYENNNTELIEFLDTLKQKLNAASSRLKRYLTCTDRKRQNINFTNNEKTFYRNLNSSHTNSNKNLEMPTPETLHKFWANIWENSVEHNKNAEWINRSSQVACDEMEFKQIPIDTFLTVIKHAHNWKAPGTDHIHNFWYKKFTSTHIHLHNHLNKFIQHPDTIPTYITHGVTYVLPKDSKDTKNPSKYRPITCLQTIYKILTACISEIIYKHLSHYNILAEQQKGCRKNSQGCKEQLTIDAVVMNIAAKQKRNIHTMFIDYQKAYDSIPHSWLIQVLQIYKVHPIIVTLLQTCMSRWQTALKIKQDKNFIVTDRIRIQRGIFQGDALSPLWFCLALNPLSQLLNESNLGFNILSNTDNVALSHLMYMDDIKLFGATKEQLFQLADITEKFSVDVQMDFGVDKCKILSVHNGKIESNAYILQSGEQVEPMDQFSVYKYLGFQQSRQIQHNEIKLEICKKFKNRLNLILKTYLNSKNTIKAINTYAIPVLTYSFGIIRWTKTDLKNLQRTINTHLTKHRKHHPKACTQRLTLPRQEGGRGLIDIENLHNTQISILRKYFHSKAEIISLHRCIAEADNKLTPLNLKDKQTQSNEQINTAQEKTTTWLGKVLHGRHRAHICQQHIDKEMSNAWLKKGDLFPETEGFMTAIQDETIVTRNYKKYIIKDPLQTTDLCRHCSGASETIQHITGGCKALAQTDYKHRHDQVAAIVHQQLAYRYKLIPKMTQYYKYKPDSVLENSLYKMYWDRTIVTDKTIYANRPDITVHDKVNKTIYLIDIAIPNSHNIQNTVSEKLSKYRDLAIELRTQWKAQTIHIIPIVLSSTGVIPKSLVQNLNTLNMPHYTLHMLQKAAILNTCHITRKFLSSSTISSSTVTIQ

SEQ ID NO: 32675 - protein, 1154 aa, Thymelicus sylvestris
MHSSTNTYFTPKRSIIILIIIIIITDIGKNLTAYRRSLRLKFIDLCPQLSHLSEQRISDQQRAIINNKYIPDERLKKIREEVEKTLYNNNRLIEHLSVQVDLEPSLPTVARMTQSEQQIERELEPSTDIPHFIAEKGNQLEIEVQEKVDAEFKMNLQRFINSDPESRPYIPKQKTSKKFAMLVSYINKHILPKHITNNQDFNTFQTIIYTAAFTAAIFNGTKIGMTDEQIKLKCKPAWQKRLEDKIQLLRSQIGRLTQYIQGNRNKRIIKTVEVIKVKYQIHTTYENSNTELKEFLDTLKQKLNAASSRLKRYLTCTDRKRQNSNFTNNEKTFYRNLNSSHTNSTKNLEMPTPETLHKFWANIWENSVEHNKNAQWINRSSQVACDEMGFKQLPIDTFLAVIKHAHNWKAPGTDHIHNFWYKKFTSTHIHLHNHLNKFIQHPDTIPTYITHGITYVLPKDLKDTKNPSKYRPITCLQTLYKILTACISELIYKHLSHYNILAEQQKGCRKNSQGCKEQLTIDAVVMNIAAKQKRNIHTMFIDYQKAYDSIPHSWLIQVLQIYKVHPIIVTFLQTCMSQWQTALKIKLDKNFIVTDPIRIQRGIFQGDALSPLWFCLALNPLSQLLIESNLGFNISSNTDNVALSHLLYMDDIKLFGATKEQLFQLADITQKFSVDVQMDFGVDKCKILSVHNGKIESNNYTLQSGEQVEPMDQFSVYKYLGFQQSRQIQHNQIKFEICKKFEYRLNLILKTYLNSKNTIKAINTYAIPVLTYSFGIIRWTKTDLKKLQRTINTHLTKHRKHHPKACMQRLTLPRQEGGRGLIDIENLHNTQISILRKYFHSKAEIIPLHRCITEADNKLTPLNLKDKQTQTNEQINTAQEKTTTWLGKVLHGRHRAHICQQHIDKEMSNAWLKKGELFPETEGFMVAIQDETIVTRNYKKYIIKDPLQTTDLCRHCSAASETIQHITGGCRALAQTDYKHRHDQVAAIVHQQLAYRYKLIPKMTPYYKYKPASVLENSYYKIYWDRTIVTDKTIYANRPDITVHDKVNKTIYLIDIAIPNSHNIQNTVSEKLSKYRDLAIELRTQWKAKTIHIVPIVLSSTGVIPKSLVQNLNTLNMPHYTLHMLQKAAILNTCHITRKFLSSSTISSSTITIQ

SEQ ID NO: 32676 - protein, 1446 aa, Thymelicus sylvestris
MEYRLRSKRIGPLPGGNRRGTPGADAGCFSMRTVSGEELSRRAPSGSPEHTTANYTSDIADLNSSALIAKPNSPSTSFHTSPPMSLSGRKSFILPTKTTSQEGRSGFRSVYNLRPKKPCQTKSTLRVENFNHQQHDIESLSTSPSSSLFPSPDSSPNHFEYFDSKSLSSESVDVVQAAMADNIAPTADHKCARKRWSEEMNRFIWRTYLKITKIETVNQKSYLSSLHQEFVNHFPTMQVSRQRIGDQRRAIIRNKLLPQEILNQIKAEVTLEIDNIITVNETQLTQNIDMNPTSQRRKMIWTDSLNETLIKCFYEVTDIGKNLTAYRRSLRLKFIDLCPQLSHLSEQRLSDQQRAIINNKYIPDERLKKIREEVEKTLYNNNRLIEHLSVQVDLEPPVPTVARTTQSEQQIERELEPSTDIPHFIAEKRNQLEIEVQEKVDAEFKMNLQRFINSDPESRPYIPKQKTSKKFAMLVSYINKHILPKHITTNQDFNTFQTIIYSAAFTAAIFNGTKIGMTDEQIKLKCKPAWQKRLEDKIQLYRSQIGRLTQYIQGNRNKRIIKTVEVIKVKYQIHTTYENNNTELREFLDTLKQKLNAASSRLKRYLTCTDRKCQNSNFTNNEKTFYRNLNSSHTNSTKNLEMPTPETLHKFWANIWENSVEHNKNAQWINRSSQVACDEMGFKQIPIDTFLTVIKHAHNWKAPGTDHIHNFWYKKFTSTHIHLHNHLNKFIQHPDTIPTYITHGITYVLPKDLKDTKNPSKYRPITCLQTLYKILTACISELIYKHLSHYNILAEQQKGCRKNSQGCKEQLTIDAVVMNIAAKQKRNIHTMFIDYQKAYDSIPHSWLIQVLQIYKVHPIIVTFLQTCMSQWQTALKIKLDKNFIVTDPIRIQRGIFQGDALSPLWFCLALNPLSQLLNESNLGFNISSNTNNVTLSHLMYMDDIKLFGATKEQLFQLANITQKFSVDVQMDFGVDKCKILSVHNGKIESNNYTLQSGEQVEPMDQFSVYKYLGFQQSRQIQHNQIKFEICKKFEYRLNLILKTYLNSKNTIKAINTYAIPVLTYSFGIIRWTKTDLKKLQRTINTHLTKHRKHHPKACMQRLTLPRQEGGRGLIDIENLHNTQISILRKYFHSKAEIIPLHRCITEADNKLTPLNLKDKQTQTNEQINTAQEKTTTWLGKVLHGRHRAHICQQHIDKEMSNAWLKKGELFPETEGFMVAIQDETIVTRNYKKYIIKDPLQTTDLCRHCSAASETIQHITGGCRALAQTDYKHRHDQVAAIVHQQLAYRYKLIPKMTPYYKYKPASILENSYYKIYWDRTIVTDKTIYANRPDITVHDKVNKTIYLIDIAIPNSHNIQNTVSEKLSKYRDLAIELRTQWKAQTIHIVPIVLSSTGVIPKSLVQNLNTLNMPHYTVHMLQKAAILNTCHITRKFLSSSTISSSTITIQ

SEQ ID NO: 32677 - protein, 930 aa, Thymelicus sylvestris
MTDEQIKLKCKPAWQKRLEDKIQLFRSQIGRLTQYIQGNRNKRIIKTVEVIKVKYQIHTTYENSNTELKEFLDTLKQKLNAASSRLKRYLICTDRKRQNSNFTNNEKTFYRNLNSSHTNSTKNLEMPTPETLHKFWANIWENSVEHNKNAQWINRSSQVACDEMGFKQLPIDTFLAVIKHAHNWKAPGTDHIHNFWYKKFTSTHIHLHNHLNKFIQHPDTIPTYITHGITYVLPKDLKDTKNPSKYRPITCLQTLYKILTACISELIYKHLSHYNILAEQQKGCRKNSQGCKEQLTIDAVVMNIAAKQKRNIHTMFIDYQKAYDSIPHSWLIQVLQIYKVHPIIVTFLQTCMSQWQTALKIKLDKNFIVTDPIRIQRGIFQGDALSPLWFCLALNPLSQLLNESNLGFNISSNTDNVALSHLMYMDDIKLFGATKEQLFQLADITQKFSVDVQMDFGVDKCKILSVHNGKIESNNYTLQSGEQVEPMDQFSVYKYLGFQQSRQIQHNQIKFEICKKFEYRLNLILKTYLNSKNTIKAINTYAIPVLTYSFGIIRWTKTDLKKLQRTINTHLTKHRKHHPKACMQRLTLPRQEGGRGLIDIENLHNTQISILRKYFHSKAEIIPLHRCITEADNKLTPLNLKDKQTQTNEQINTAQEKTTTWLGKVLHGRHRAHICQQHIDKEMSNAWLKKGELFPETEGFMVAIQDETIVTRNYKKYIIKDPLQTTDLCRHCSAASETIQHITGGCRALAQTDYKHRHDQVAAIVHQQLAYRYKLIPKMTPYYKYKPASVLENSYYKIYWDRTIVTDKTIYANRPDITVHDKVNKTIYLIDIAIPNSHNIQNTVSEKLSKYRDLAIELRTQWKAKTIHIVPIVLSSTGVIPKSLVQNLNTLNMPHYTLHMLQKAAILNTCHITRKFLSSSTISSSTITIQ

SEQ ID NO: 32678 - protein, 1424 aa, Atrytonopsis hianna
MRTVSGEELNRRAPSGSPEYITANHTHFNLRTSTLNQNNPSISSQTPSQTSTSGQKSLVLSLSTVSHERSTASRSVYNLRARKPSQKISTLCVEDSNLQYDKESLRTSSTQSLFLSPDSSPNRFEYFDSESQSSESVDVVQEAKADNIAPIAGHTRARKRWSEEMNRFIWRTYLKITRIETVNQRSYLSSLHHQFISHFPTMQVTRQRIGDQRRAIIRNKLLSQEILNQIKAEVTLEIDNLITGPQTINETQITQNIAAYPTLQRRKMTWTDSLNETLIRCFYEVTNGGKDLTAYRRNLRLKFIDRCPQLAHLSEQRISDQQRAIINNKYIPDERLNNIREEVEKSIHNSTMTECLPAQSDLEPLIPTENSYSITEIEPPHMEGEERELLNTTPITETLHDMNDKHTNNLEVQVQEKVEAEFMTNLQRFINSDPECRPYIPKQKTSKKLAMIISYINKHILPKHLTPNQNFITLQTIIYTGAFTAATFNGTKLGISDEHTRPKCKPPWQKRLEDKIKLLRSYIGRLTQYIQGNTNKRIVKTVEIIKIKYRNHTRHENNNTELNEFLDTLKQKLSVASSRLKRYLACSDRKRQNRNFTNNEKSFYRNLNSLETNSNKELEMPTPETLRNFWANIWETPVEHNKHAEWINKSSEVAYGEMEFEEIPIDTFRKVIKNIHNWKTPGTDHIHNYWYKKFTSIHIHIYNHLNKFIQYPDTIPTYITHGVTFVLPKDPNDTKNPAKYRPITCLQTIYKILTTCISELLYEHLSNHNILAEQQKGCRKNSQGCKEQLTIDAVVMNIAAKQKRNIHAMFIDYQKAYDSIPHSWLIQVLQIYKVHPIIITFLQACMNRWQTALKVKQDKNFIVTEPIRIQRGIFQGDALSPLWFCLALNPLSQLLNESKLGFSICNNTRTAALTHLMYMDDIKLFGATKEQLFHLADITQQFSRDVHMNFGVDKCKILSIHKGKIEANTYMLQSGEQIEPMSQNSVYKYLGFQQSRLIQHNKIKLEICKKFKSRLNLILKTHLNSKNTVKAINTYAIPVLTYSFGIIRWSRTDLIKLQRTINTHLTKHRKHHPKSCTQRLTLSRQEGGRGLIDIENLHNTQISILRRYFHSKAELTFLHRHITEADDKLTPLNLKNKQTQTNEQIKTAQEKTTAWVGKALHGRHRTHLCQQHIDKEMSNEWLKRGELFPETEGFMVAIQDETIVTRNYKKYIMKDPLQTSDLCRHCSAASETIQHITGGCKTLAQTDYKHRHDQVAAIIHQQLAYRYKLIPKMTPYYKYKPDSVLENSSYKMYWDRTIVTDKTIYANRPDITIHDKPNKTIYLIDVAIPNTHNIQSTISEKLSKYRDLAIELKTQWKAQTIHIVPIVLSSTGVIPKSLTQSLNILNMPYYTLHMVQKAAILNTCHITRKFLSSSTISSSTSTIQ

SEQ ID NO: 32679 - protein, 1247 aa, Thymelicus sylvestris
MNRFIWRTYLKITKIETVNQKSYLSSLHQEFVNHFPTMQVSRQRIGDQRRAIIRNKLLPQEILNQIKAEVTLEIDNIITVNETQLTQNIDMNPTSQRRKMIWTDSLNETLIKCFYEVTDIGKNLTAYRRSLRLKFIDLCPQLSHLSEQRLSDQQRAIINNKYIPDERLKKIREEVEKTLYNNNRLIEHLSVQVDLEPPVPTVARTTQSEQQIERELEPSTDIPHFIAEKRNQLEIEVQEKVDAEFKMNLQRFINSDPESRPYIPKQKTSKKFAMLVSYINKHILPKHITTNQDFNTFQTIIYSAAFTAAIFNGTKIGMTDEQIKLKCKPAWQKRLEDKIQLYRSQIGRLTQYIQGNRNKRIIKTVEVIKVKYQIHTTYENNNTELREFLDTLKQKLNAASSRLKRYLTCTDRKCQNSNFTNNEKTFYRNLNSSHTNSTKNLEMPTPETLHKFWANIWENSVEHNKNAQWINRSSQVACDEMGFKQIPIDTFLTVIKHAHNWKAPGTDHIHNFWYKKFTSTHIHLHNHLNKFIQHPDTIPTYITHGITYVLPKDLKDTKNPSKYRPITCLQTLYKILTACISELIYKHLSHYNILAEQQKGCRKNSQGCKEQLTIDAVVMNIAAKQKRNIHTMFIDYQKAYDSIPHSWLIQVLQIYKVHPIIVTFLQTCMSQWQTALKIKLDKNFIVTDPIRIQRGIFQGDALSPLWFCLALNPLSQLLNESNLGFNISSNTNNVTLSHLMYMDDIKLFGATKEQLFQLANITQKFSVDVQMDFGVDKCKILSVHNGKIESNNYTLQSGEQVEPMDQFSVYKYLGFQQSRQIQHNQIKFEICKKFEYRLNLILKTYLNSKNTIKAINTYAIPVLTYSFGIIRWTKTDLKKLQRTINTHLTKHRKHHPKACMQRLTLPRQEGGRGLIDIENLHNTQISILRKYFHSKAEIIPLHRCITEADNKLTPLNLKDKQTQTNEQINTAQEKTTTWLGKVLHGRHRAHICQQHIDKEMSNAWLKKGELFPETEGFMVAIQDETIVTRNYKKYIIKDPLQTTDLCRHCSAASETIQHITGGCRALAQTDYKHRHDQVAAIVHQQLAYRYKLIPKMTPYYKYKPASILENSYYKIYWDRTIVTDKTIYANRPDITVHDKVNKTIYLIDIAIPNSHNIQNTVSEKLSKYRDLAIELRTQWKAQTIHIVPIVLSSTGVIPKSLVQNLNTLNMPHYTVHMLQKAAILNTCHITRKFLSSSIISSSTITIQ

SEQ ID NO: 32680 - protein, 1253 aa, Euphyes dion
MNRFIWRTYLKITRMETVNQKSYLSSLHQQFSSHFPTMQVSRQRIGDQRRAIIRNKLLSQAILTQIKTEVSLELDNLSTETQSIHVTQLTQNGTTHPISQRQKMSWTDLLNENLIRCFYEVTNGGSNLTAYRRNMRLKFIDMFPQLSHLSEQRISDQQRAIINNKYISDETLQKIREEVERSLHSNTPEECLTSQINLEPLLPAEFNNDTITQVEQQIEGEEIDFLHTQTIHKYTDNLEIDIQENIEREFMTNLHRFMNSNPDCRPYIPRQKTSKKLAMITSYINKNILPKHLIPDLNFTTLQTIIYSGAYTAATLNGTKIGRSAEYDIRPKCKPLWQKRLEDKINLLRSYIGHLTQYIQGNRNKRIIKTVEIIKFKYQSHTKHENNNTELKDFLDTLKQKLSVASNRLKRYLTCTDRKRQNKNFTNNEKNFYRNLNTLQTKSNKKVKMPTPEELRNFWADIWDNPVEHNKNAEWINRSSEGVCAEMEFKQISMETFLKVIKNTHNWKAPGTDHIHNYWYKKFTSVHIHLYNYLNKFIQYPDTIPTYITSGITFVLPKDPNDTVNPAKYRPITCLQTIYKIFTACISEVIYEHLSHYNILTEQQKGCRKNSQGCKEQLTIDAVVMNIAAKEKRNIHTMFIDYQKAYDSIPHSWLVQVLQIYKIHPIIITFLQKCMNRWQTALKIKSETNFVVTDPIRIQRGIFQGDALSPLWFCLALNPLSQLLNSSKLGFNVSTNTSHEALTHLMYMDDIKLYGATKTQLFQLADITQQFSRDVHMNFGVDKCKILSIHKGKIENNSYKLQSGQHIEPMDHSSVYKYLGFQQSRQIQHNKIKIEICKKFKNRLNLILKSYLNSKNTIKAINTYAIPVLTYSFGIIRWSKTDLIKLQRTVNTHLTKHRKHHPKACTQRLTLCRHEGGRGLIDIENLHNTQISILRRYFHSKAELTSVHRYITEADNKLTPLNLKDKQAQTNEHIKTAQEKTTTWLGKVLHGRHRKHISQQHIDKEMSNEWLKRGELFPETEGFMMAIQDETIVTRNYKKYIIKDPKQTSDLCRHCATASETIQHITGGCKTLAQTDYKHRHDQVAAIVHQQLAYKYKLIPKMIPYYKYKPDSVLENSNYKMYWDRTIVTDKATYANRPDITIHEKANKTIYFIDVAIPNSHNIQNTISEKLSKYRDLAIEIKTQWKAQTIHIIPIVLSSTGVVPKSLVQNLNMLNMPHYTLHMLQKAAILNTCHITRKFLSSSTISSSTSIIQ

SEQ ID NO: 32681 - protein, 1429 aa, Niconiades incomptus
MERRTRSKRIWPLPGGDRRGTLGADAGCLSMRTVSGEELNRRALSGSPEYITANHNRRNDSLDPTTSIVKRNSPLTSCNQKSQILPSVTVSQEGRAASRSIYNLRARKPCQTDSAPSVAEYDRLQHRKSSSVSSTESLFPSPDSSPNRFECFDSNSQSSESVDVVQEAEADHTAPTPGYKRARKRWTEEMNRFIWRTYLKITRLETVNQKSYLSSLHQQFSRQFPTMQVTRQRIGDQRRAIIRNKLLSNEILTKIKGQVTLEMVDGSETQDTQIDIGSMTQRRKMTWTDSLNEALIRCFYEVTDVGKHLTAYRRRLRLKFIEVYPQLSHLSEQRISDQQRAIINNKYIPDERLKEIREEIERSLHNNIITECRPVRSETRITNTEEQIETEESEQHTQTLTYTPHAAEKRSEELEMQMQEIVEAEFMTNFERFSNNDPDCRPYIPKQKNSKRLAMLTSYINKNILPKNLTSEQDFGTLQTIIYTGAFTAATCNGAKIEVTKEHIRPKCKPPWQKRLEDKIQLLRSHIGRLTQYIQGNRNKRIVKTVESIKIKYQNHTRHETSNTELNEFLDTLKQKLSATSNRLKRYLACTDRKRQNKNFTNNEKQFYRDLNSSHTNNNKKVEMPTSEILHKFWSNIWENPVEHNKDAEWINESSGVSCGEMEFKQISIDIFLNVLKRTHNWKAPGTDHIQNYWYKKFTSVHVHLHKHLNTFIQHPDTIPTYITRGITFVLPKDLNDTKNPSKYRPITCLQTIYKIFTACISELIYEHLTQYNILAEQQKGCRKNSQGCKEQLTIDAVVMNSAARQKGNIHTMFIDYQKAYDSIPHSWLIQVLQMYKVHPIIIKFLQTCMNRWQTALKIKTDKNFTVTQPIRILRGIFQGDALSPLWFCLALNPLSHLLNASKLGVRISNNTNNETLSHLMYMDDIKLFGNTKEQLFQLADITQDFSKDVQMEFGVDKCKILSVQNGKVEINNYYTLQSGKQIEPMNQYSVYKYLGFQQSRQIQHNKIKLEICKKFESRLNLILKTHLNSKNTIKAINTFAIPVLTYSFGIIRWTRTDLIKLQRTINTHLTKYRKHHPKACTQRLTLPRQEGGRGLIDVENLHNKQITILRKYFHAKAEITLLHRHVTEADNKLTPLNLKNKQLQANEQIITAQEKTTTWIRKVLHGRHRTHICQEHVDKEMSNEWLKRGELFPETEGFMVAIQDETIVTRNYKKYIIRDPLQNSDLCRHCSAASETIQHITGGCKTLAQTDYKHRHDQVAAIIHQQLAYRYKLIPKMIPYYKYKPDTILEDSNYKLYWDRTIVTDKTIYANRPDITIHDKSNKTIYLIDIAVPNSHNIQSTISEKLSKYRDLAIELRVQWKAQTVHIIPIVLSATGVIPKSLVQSLSILSMPHYILHMLQKAAILNTCHITRKFLSSSTISSSTVTIQ

SEQ ID NO: 32682 - protein, 1381 aa, Spialia ferax
MKSTTRTRPQVPGGSCHLPDSDGSWAGAGSRGAYNLRVRKNRQTTMACLTDSDQQCDTDQPSSPISSTTSLFQTPSSSPSSSYSIPTSRSSTITPMSVNVVHETDVENNAPTTVNKRARKRWSDEMNRFIWRTYLRITKIETTNLKSYLPLLHQHFTEEFPNMQASRQRIGDQRRAILRNNLLTNAVLAQIKTEVTEELNTSETTQYTKPSDSKNKSNIDTSTSYITQKTKTKMHWSDDLNETLIRCYYEVTEIGTHLTAYRSRLKNRFIELYPELSHLSEQRISDQQRAIINNKYIRDERLSEIRKEVESKLHSNLLNRTESHTLDDIIIDNTIVTQRSEEEIEKEGTESTQNFIHSQESHESLEPSIREKLLQDFTSNFECFKNSDPTSRPYIPKQKISKRLAMIVAYVNKNILPKFLKPELNFIELQTIIYTGAYTIATCNGTKIRIGIENSNKRHLKPFWQKRLEDKIKMLRADIGRLTQFIQGNTNKRILKKIEIIKTKYQIHAKYDHVNVELTEFLDTLKQKLNAASSRLKRYLTCTERKLQNNNFKNNEKNFYRNLNNCIQSNEFTMEQPPIDSLREFWSNIWEQPVEHNKTAEWMVEDKLLTPCTEMEFKHIPMDIFLKVIKNTHNWKAPGTDNIHNYWYKKLTSTHIYIYNNLNTFLRHPDTMPKYVTQGITFMLPKDLNDTSNPAKYRPITCLQTIYKLLTSCISEVLYEYLLKNNIIAEQQKGCRKNSQGCKEQLIIDSIAMNFAVKHKRNIHTMFIDYQKAYDSVPHSWLIETLQIYKIHPIIITFLKSTMTRWQTSLKTKQGTQFVTTGPIQIKRGIFQGDTLSPLWFCLALNPLSDLLNKTNLGFRFNNNVIEGNLTHLMYMDDIKLFAGTKNDLDKLANITEKFSADIHMDFGVDKCKILSISKGKIVNNSYTLKSGKTIEPLDQYSTYKYLGFKQSKRIHHNSIKSEIIQKFKFRLHLILKTYLNSKNTIKAINTFAIPLLTYSFGIINWTTYNLKNIERIIRTHLTKFRKHHPKACTQRLTLPRQEGGRGLIDIQNLHNTQIGTLRRYFYSKTEQSQLHKYAAAADNRLTPLNLKNTQTQHNEQITNTEEKILAWTEKSLHGRHRAHLCQAYVDKEKSNEWLRRGELFPETEGFMIAIQDETIVTRNFKKYIIKDPKQVNDSCRHCNAAPETIQHIIGGCRCLAQTDYKHRHDQVAAIIHQQLAFKYKLLPNMIQYYKYKPNSVLEDAKYKIYWDRTIITDKTIHYNRPDITIHDKINKTVYLVDVAIPNSHNIQSTISEKLNKYQDLAIELRTQWKVQHIHIIPIVLSSTGVIPKTLLRNLNTLNLPDYTLHMLQKATILNTCRITRKFLTTSTISTSALDVL

SEQ ID NO: 32683 - protein, 1381 aa, Tiana niger
MESTTRPRPQVPGGSSNFPDSDGSRAGTGSRGVYNLRVRKNRQTNMAYLKDSDLQSDKEQSSSPTSSSTSLFQTPISSPTSLQFITSPRSSTITPISVNVVHETEVDNVAPITGNKRARKRWSDEMNKFIWRTYLQITHLETINLKSYLPSLHQHFSEKFPNMQATRQRVGDQRRAILRNKLLSNDILNQIKTEVMQELDISETTSITNTEANKKQLITEIPHTYKKFKMNWSDSLNETLIRCYYDVTELTTNLTAYRNKLRNRFIEVCPQLSHLSEQRLSDQQRAIINNKYISHEKLLQIKKEVESRLQNNSLDITYRDREHIENDIYLNEDPIATHIGQEIEIEETESQGNTIRPTSKHNECLDHSMKEKLLTEFVSNLEFFKNMYPTSRPFIPKQKICKNLAIIVTYMNDNVLPNFLTSEQSFIDLQTIIYAGAYTIATCNGTKIGINRERNCKRYSKPSWQRRLENKIKTLRADIGRLTQYNQGNRNKRIVNIVERIKIKYQIHTKYENINTELNEFLDTLKQKLNVASSRLKRYLTCTDRKIQNNNFKNNEKNFYRNLNASTQPKDTVTNPPSPDLLREFWANIWENPVEHNNAAEWINFNKLSTSNNAMEFKHIPMDIFIKVIKSTHNWKAPGTDNIHNYWYKKLTCTHIHLYNKLNTFLQHPDTMPNYITQGITFMLPKDLSDASNPGKYRPITCLQTIYKLMTSCISEILHEHILKNNVMAEQQKGCRKNSQGCKEQLTLDSIAMNSAIKQKRNIHTMFIDYQKAYDTVPHSWLIETLQIYKVHPTIISFLKSSMVKWQTSLKIKKGTQFITTEPIYIRRGIFQGDTLSPLWFCLALNPLSNLLNQTNLGYRFNNNIVEGNMTHLMYMDDIKLFAGSKDDLFHLADITQKFSSDIRMEFGVDKCKILSVCKGKIVKNSYMLENGEIIEPLDQYSTYKYLGFKQSRRIHHNSIKSEITKKFKHRINLILKTFLNSKNTIKAINTYAIPILTYSFGIIRWTKTNLKNIERIIRTHLTKYRKHHPKACTQRLTLPRQEGGRGLIEIENLHNTQIKTLRHYFHTKSGQTHLHKQATEADDRLTPLNLKNKDTQCNQHITTTQEKILTWTGKSLHGRHRSHICQQYVDKEKSNEWLRRGELFPETEGFMIAIQDEMIVTRNFKKHIIKDPKQINDLCRHCNAASETIQHITGGCRCLAQTDYKHRHDQVAAIIHQQLAFRYKLIPKMIQYYKYKPNAVLEDRNYKIYWDRTIITDKTIHYNRPDITIHDKINKIVYLIDVAIPNSHNIQSTISEKLKKYQDLAIELRVQWKVQNIYIIPIVLSTTGIIPKTLLQNLSILNLPDYTLHMLQKATILNTCRITRKFLTSSIISAATIHIK

SEQ ID NO: 32684 - protein, 1353 aa, Ernsta colotes
MKSTTRPRPQVPGGSSYFPDPDGSWAGTGPRGVYNLRVRKNRQTTTACLMDSDLQRDKDQPSSPISSSTSLFQSPPSSPTSSPSSFKSIPVSRSSTITPMSVDVVHETDVDNNAPTTVSKRARKRWSDEMNRYIWRTYLRVTQIETINLKSYLPLLHENFTEKFPNMQATRQRVGDQRRAILRNKLLSNEILAEIKAEVKEELSITENIQSTTTTISRNKPNNDTLHTTQKTKMHWSNELNEKLLTCYYEVTKIGTNLTAYRSRLRNRFIELCSDLSHLSEQRLSDQQRAIINNKYIPDDRLIQIRKEVESKLNMQILNTTQQILEDSLIDNNLTTQRTEQEIEREQTESNLEFFTSSDPTLRPHIPKQKTSKRLAMMVAYVNTKILPTFLKPDQSFIDLQTIIYVGAYTIATCNGIKISISNNINSNKHQTKPLWQKRLENKIETLRADIGRLTQFIQGNTSKRSTLKKIEIIKTKYRTHAQYDHVNTELNEFLDTLKQKLNAKCNRLQRYLKCTDRKVQNNNFKNNEKSFYRNLNATVQPSRANMEQPPIESLREFWAHIWEQPVEHNKAAAWITDNKLSTPCTEMEFEHIPMDTFVKVIKSTHNWKAPGTDNIHNYWYKKFTSTHIHLYNNLNTFLQHPETMPNYITQGITFMLPKDLNDTSNPAKYRPITCLQTIYKLLTSCISEILYEYLLKNNIMAEQQKGCRKNSQGCKEQLILDSIAMNIAIKHNKNIHTMFIDYQKAYDTVPHSWLIETLQIYKIHPTIITFLKLSMVRWETSLKIKQETQFITTEPIHIRRGIFQGDSLSPLWFCLALNPLSDMLNKTNLGFRFDSNIIEGNMTHLMYMDDIKLYSDTKHDLYKLANIIEKFSLDIRMNFGVDKCRILSVCKGKLENNSYTLNSGEIIEPLDQYSTYKYLGFKQSKRIHHNSIKSEIMQKFKFRLHTILKTYLNSKNTIKAINTYAIPLLTYSFGIIRWSTSNLKNIERIIRTNLTKYRKHHPKACTQRLSLPRTEGGRGLIDIENLHNTQIGTLRRYFHSKAEQSQIHKYATKLDDRITPLNLKSTQTQPNEHITTVEEKISAWTGKALHGRHRTHLCHSYIDKDKSNEWLRRGELFPETEGFMIAIQDETIVTRNFKKYIIKDPKQTNDLCRHCNAAPETIQHIIGGCRCLAQTDYKHRHDQVAAIIHQQLAFRYKLLPKMIQYYKYKPSSVLEDAKYKIYWDRTIITDKTIHYNRPDITVHDKINKIVYLIDIAIPNSHNIQNTTSEKLNKYQDLAIELRTQWKAQSIHIIPIVLSSTGIVPKTLLRNLSTLNLPYYTLHMLQKATILNTCRITRKFLTSSTISAASVNI

SEQ ID NO: 32685 - protein, 941 aa, Kradibia gibbosae
MHKAWFDRINTPSNQAKARWTVEERNLLATKEALLTGTVRFINKALHQAFPERTLESIKGQRRLQCYKDTVASLLAASNSPSSCPASPLQPPSEDPDRLLEFLSNHPVLQGEDFQQSRLQDILNRAFTSRDKTRTLQDITLFLKDVLGNGQHRCAIPTRPLPPTSRKILRRREYAATQRHWKANRSRCIRSILGELEDSTQPPRERMEPYWSTVFTQPATITKPTLTSASVLQGIWEPVTLQEIKTNLPPLAVSPGPDGLTARQLREIPPPVILVVVNLLLWCGSLPDQLSRARTIFIPKKAHARQPGDFRPITVSSVLTRLVHKVIAQRIDGAVCLSKEQRAFRKGIDGCRDNTVLLDAILKNTMASHRSLHMASVDIAKAFDSVHHSALLACAKAAGLPLELLDYIEGYYASSRTTLGGPGWCSPPLRVTRGVRQGDPLSPVLFNIVMDTLLRSLPPTSGVEFNGNNIRAMAFADDLVLLAETPAGLQDLLNRTSSFLGQCGMLPNIEKSHSLSIFGDGHKKRATVDQSRKFTVNHQPLRALSREDSWSYLGIEFSPEGRRRSPLASKASELLRSLTKAPLKPQQRLFALRTNALPSLFYDMALGSVSIGELSRVDTMVRGTVKQWLCLPNDTPSGYFHAPVGEGGLGLPSIRWLAPLHRRRRLMSFVGDHCGEYLRLEIASCEKRLTDKGVAIRHTEDINKRWAALLHTSIEGSPLKASAAATGQHQWVADGTRLLTGRDYINCNRVRIGALPSRSRTTRGRGLDRTCRAGCGAAETNNHILQICPRTHNIRIQRHDAVLSFAARSLRRQGYTVKEEPHFTTSVGLRKPDLLATMGSLAVVIDAGIVGEQSDLERARTFKIRKYADIPDIDDAIRRDFGVTSILHLPMILNCRGVWNAKCIQDLLQLGILTRRDASIMATRVLIGGYAAFRVFNRRTG

SEQ ID NO: 32686 - protein, 941 aa, Kradibia gibbosae
MHKAWFDRINTPSNQAKARWTVEEQNLLATKEALLTGTVRFINKALHQAFPERTLESIKGQRRLQCYKDTVASLLAASNSPSSCPASPLQPPSENPDRLLEFLSNHPVLQGEDFQQSRLQDILNRAFTSRDKTRTLQDITLFLKDVLGNGQHRCAIPTRPLPPTSRKILRRREYAATQRHWKANRSRCIRSILGELEDSTQPPRERMEPYWSTVFTQPATNTKPTLTSASVLQGIWEPVTLQEIKTNLPPLAVSPGPDGLTARQLREIPPPVILVVVNLLLWCGSLPDQLSRARTIFIPKKAHARQPGDFRPITVSSVLTRLVHKVIAQRIDGAVCLSKEQRAFRKGIDGCRDNTVLLDAVLRNAMASHRSLHMASVDITKAFDSVHHSALLACAKAAGLPLELLDYIQGYYASSRTTLGGPGWCSPPLRVTRGVRQGDPLSPVLFNIVMDTLLRSLPPTSGVEFNGTNIRAMAFADDLVLLAETPAGLQDLLNRTSLFLGQCGMLPNIEKSHSLSIFGDGHKKRATVDQSRKFTVNHQPLRVLSREDSWSYLGIEFSPEGRRRSPLASKASELLRSLTRAPLKPQQRLFALRTSALPSLFYDMALGSVSIGELSRVDTMVRGTVKQWLCLPNDTPSGYFHAPVGEGGLGLPSIRWLAPLHRRRRLMSFVGDQCGEYLRLEIAGCEKRLTDKGVAIRHTEDINKRWAALLHNSIEGSPLKASAAATGQHQWVADGTRLLTGRDYINCNRVRIGALPSRSRTTRGRGLDRTCRAGCGVAETNNHILQICPRTHNIRIQRHDAVLSFAARNLRRQGYTVKEEPHFTTSVGLRKPDLLATMGSLAVVIEAGIVGEQSDLERARTFKIRKYADIPDIDDAIRRDFGVTSILHLPMILNCRGVWNAKCIQDLLQLGILTRRDASVMATRVLIGGYAAFRVFNRRTG

SEQ ID NO: 32687 - protein, 941 aa, Kradibia gibbosae
MHKAWFDRINTPSNQAKARWTVEERNLLATKEALLTGTVRFINKALHQAFPERTLESIKGQRRLQCYKDTVASLLAASNSPSSCPASPLQPPSEDPDRLLEFLSNHPVLQGEDFQQSRLQDILNRAFTSRDKTRTLQDITLFLKDVLGNGQHRCAIPTRPLPPTSRKILRRREYAATQRHWKANRSRCIRSILGELEDSTQPPRERMEPYWSTVFTQPATITKPTLTSASVLQGIWEPVTLQEIKTNLPPLAVSPGPDGLTARQLREIPPPVILVVVNLLLWCGSLPDQLSRARTIFIPKKAHARQPGDFRPITVSSVLTRLVHKVIAQRIDGAVCLSKEQRAFRKGIDGCRDNTVLLDAILRNTMASHRSLHMASVDIAKAFDSVHHSALLACAKAAGLPLELLDYIEGYYASSRTTLGGPGWCSPPLRVTRGVRQGDPLSPVLFNIVMDTLLRSLPPTSGVEFNGNNIRAMAFADDLVLLAETPAGLQDLLNRTSSFLGQCGMLPNIEKSHSLSIFGDGHKKRATVDQSRKFTVNHQPLRALSREDSWSYLGIEFSPEGRRRSPLASKASELLRSLTKAPLKPQQRLFALRTNALPSLFYDMALGSVSIGELSRVDTMVRGTVKQWLCLPNDTPSGYFHAPVGEGGLGLPSIRWLAPLHRRRRLMSFVGDHCGEYLRLEIASCEKRLTDKGVAIRHTEDINKRWAALLHTSIEGSPLKASAAATGQHQWVADGTRLLTGRDYINCNRVRIGALPSRSRTTRGRGLDRTCRAGCGAAETNNHILQICPRTHNIRIQRHDAVLSFAARSLRRQGYTVKEEPHFTTSVGLRKPDLLATMGSLAVVIDAGIVGEQSDLERARTFKIRKYADIPDIDDAIRRDFGVTSILHLPMILNCRGVWNAKCIQDLLQLGILTRRDASIMATRVLIGGYAAFRVFNRRTG

SEQ ID NO: 32688 - protein, 1150 aa, Apocrypta bakeri
MTDQPDLGAVAEGENVTILLPLIEGQLVCPICSNGRYNGKTRIENLNRHIKEHHPNTGVVYRCWRCGFTAPEGKRYPRKIVTAHCGDCVPEVAPTRPDGPNRANIRRQIDAPPATPVEPTLTRPTTSRGSPPPLSVLADGNAQQPEGRDPQPTTPSRDADEAPIPPAMSTHSPVEASVSRPLQGPSPPPSQAVEADAIPVDEPLVVNTVGQRPQHNTARSRPVCRSSPEQRQLVRELCEIATPEQLEELIPRVVTFLGRQTPASNVHAGAPRVAQRTARSASNRIQEAKKLQRLYRVNRKRAVQQVLAGSNQPCEISIATVEDHFQQLAAHRVGGAYWPNVFRQDDPSPVTNEELCRPFTEAEVLKALCRRNNTSPGPDGITYQDLRKADPGARVLTALYNAVWRIETVPSCWNNSNTILIFKKGDPASIANWRPISLGDTTPKLFAALLADRIKVWGMANERFHPAQKGFLQFDGCFEHNFVVQEAIHDAKARKKNLVVAWLDLTSAFNSVPHSSIIRALEGHSLPPKAKNTIAALYANMSTTVKTANGSTAPIRIHSGVRQGCPLSPDVFNLTLEVLLRRMTETGDGYTFGGRSHNILAYADDIAVLADSPDAMRRLITAAEEGAAAVGLSFNPAKCATLHINNGREVSPTQFSIQGASIPSLSTEDAYEHLGIPTGYQVKQTPINTLRELVSDARSIDTSLLAPWQKLDAVATFLLPRLDFIMQGGRVEKGYLTEADKIIKRLAKGWLSVPQRASAELVFLPPRQGGGGLLPLADLYDLLTVAHAFKILHAKDSTVSRLAYDLLRDTASKRLKKRANNTDIARYLSGDLLMPRSFAPTSFWGRVQSATRRINTKLRVRWLWEEEAKFSLVIGSEEVVVAANNTSLATTTLRRTLVEYYRESLLAKQDQGKVYEVVGKNTISNHFLRSGRNTRFCDWRFIHRARLNVLPLNAAKRWQREADKRCRRCGYDLETLPHVLCHCGVHAQARQRRHNNIVERLVKALKCPGTVAVDQTIQGTHGAAAALRPDIVVRNESSRCVTIVDVCVPFENRREAFDRACREKLEKYQPIADQLAALGYTVNMGTFIVGALGGWDRRNERCMGLLMISSRYAGMMRRLMVSDTIRWSRDIYVEHVSGVRQYATPPNDRP

SEQ ID NO: 32689 - protein, 1053 aa, Apocrypta bakeri
MGRTERTSGVKSTHRRQPRWSLRLPGRPPAGDLPLLYPSLLTVMHSNQRAGIHSRQLHREMRTRQPISPAMSTHSPVEASVSRPLQGPSPPPSQAVEADAIPVDEPLVVNTVGQRPQHNTARSRPVCRSSPEQRQLVRELCEIATPEQLEELIPRVVTFLGRQTPASSVHAGAPRAAQRTARSASNRIQEAKKLQRLYRVNRKRAVQQVLAGSNQPCEISIATVEDHFQQLAAHRVGGADWPNVFRQDDPSPVTNEELCRPFTEAEVLKALCRRNNTSPGPDGITYQDLRKADPGARVLTALYNAVWRIETVPSCWNNSNTILIFKKGDPASIANWRPISLGDTTPKLFAALLADRIKVWGMANERFHPAQKGFLQFDGCFEHNFVVQEAIHDAKARKKNLVVAWLDLTSAFNSVPHSSIIRALEGHSLPPKAKNTIAALYANMSTTVKTANGSTAPIRIHSGVRQGCPLSPDVFNLTLEVLLRRMTETGDGYTFGGRSHNILAYADDIAVLADSPDAMRRLITAAEEGAAAVGLSFNPAKCATLHINNGREVSPTQFSIQGASIPSLSTEDAYEHLGIPTGYQVKQTPINTLRELVSDARRIDTSLLAPWQKLDAVATFLLPRLDFIMQGGRVEKGYLTEADKIIKRLAKGWLSVPQRASAELVFLPPRQGGGGLLPLADLYDLLTVAHAFKILHAKDSTVSRLAYDLLRDTASKRLKKRANNTDIARYLSGDLLMPRSFAPTSFWGRVQSATRRINTKLRVRWLWEEEAKFSLVIGSEEHVVAANNTSLATTTLRRMLVRYYEESLLAKQDQGKVYEVVGKNNVSNHFLRSGRNTRFCDWRFIHRARLNVLPLNAAKRWLREADKRCRSCGYDLETLPHVLCHCGVHAQARQRRHNNIVERLVKALKCPGTVAVDQTIQGTHGAAAALRPDIVVRNESSRCVTIVDVCVPFENRREAFDRACREKLEKYQPIADQLAALGYTVNMGTFIVGALGGWDRRNERCMGLLMISSRYAGMMRRFMVSDTIRWSRDIYVEHVSGVRQYATPPTDRP

SEQ ID NO: 32690 - protein, 1151 aa, Apocrypta bakeri
MTDQPDLGAVAEGENVTILLPLIEGQLVCPICSNGRYNGKTRIENLNRHIKEHHPNTGVVYRCWRCGFTAPEGKRYPRKIVTAHCGDCVPEVAPTRPDGPNRANIRRQIDAPPATPVEPTLTRPTTSRGSPPPLSVLADGNAQQPEGRDPQPTTPSRDADEAPISPAMSTHSPVEASVSRPLQGPSPPPSQAVEADAIPVDEPLVVNTVGQRPQHNTARSRPVCRSSPEQRQLARELCEIATPEQLEELIPRVVTFLGRQTPASSVHAGAPRAAQRTARSASNRIQEAKKLQRLYRVNRKRAVQQVLAGSNQPCEISIATVEDHFQQLAAHRVGGADWPNVFRQDDPSPVTNEELCRPFTEAEVLKALCRRNNTSPGPDGITYQDLRKADPGARVLTALYNAVWRIETVPSCWNNSNTILIFKKGDPASIANWRPISLGDTTPKLFAALLADRIKVWGMANERFHPAQKGFLQFDGCFEHNFVVQEAIHDAKARKKNLVVAWLDLTSAFNSVPHSSIIRALEGHSLPPKAKNTIAALYANMSTTVKTANGSTAPIRIHSGVRQGCPLSPDVFNLTLEVLLRRMTETGDGYTFGGRSHNILAYADDIAVLADSPDAMRRLITAAEEGAAAVGLSFNPAKCATLHINNGREVSPTQFSIQGASIPSLSTEDAYEHLGIPTGYQVKQTPINTLRELVSDARSIDTSLLAPWQKLDAVATFLLPRLDFIMQGGRVEKGYLTEADKIIKRLAKGWLSVPQRASAELVFLPPRQGGGGLLPLADLYDLLTVAHAFKILHAKDSTVSRLAYDLLRDTASKRLKKRANNTDIARYLSGDLLMPRSFAPTSFWGRVQSATRRINTKLRVRWLWEEEAKFSLVIGSEEHVVAANNTSLATTTLRRMLVRYYEESLLAKQDQGKVYEVVGKNSVSNHFLRSGRNTRFCDWRFIHRARLNVLPLNAAKRWLREADKRCRSCGYDLETLPHVLCHCGVHAQARQRRHNNIVERLVKALKCPGTVAVDQTIQGTHGAAAALRPDIVVRNESSRCVTIVDVCVPFENRREAFDRACREKLEKYQPIADQLAALGYTVNMGTFIVGALGGWDRRNERCMSLLMISSRYAGMMRRFMVSDTIRWSRDIYVEHVSGVRQYATPPTTDRP

SEQ ID NO: 32691 - protein, 1205 aa, Hypermnestra helios
MYRTRQQIQMNAANTSTAHTTSPQENPTPMEGNRRGTRRTSVTSLRRRRAPPTGLGPAGNVIPQEDPATDGVVRRRMRWTQEINISVMRAYYKATKGGTSLTSYRPKMLFEFQQLQPSLSNLTAQRLSDQVRVILSRKILDDGILDQLRSEYSTSTIEPIFNLQQILPLAGENNNTNISNTNNNVNINNNNESEKIDQNSFDVDVSSQDSEYMRKTFECSILEYKNIPIENRPKLPKLPYHRKTILTVASMNVICKDYFENCDSILDIMSLLYCCAHTVCIILNIPLISVQSSKKKNNSEPKWKMRIKARIESTRKIIGKLISYQTGNRRNKILALVNQIANEIKISKSDPRFPDKITEYIDTLKQKLKAWANRIRRYSERSKRYFQNRTFESNQKWVYRSWENTAPNNGTDNRPSLNECLNFWKNIWSNEVSHDEDEWIGATERVCCNLTSMGPISITAEDVYTITRKLHNWKSPGPDGIHNFWLKWITNSHTRLAAQIQDAIECCELPRLLTTGITHLLYKNGDTADPKNYRPITCLSTTYKLITAILNNKIYNHLEKNNILSIAQNGCRKGSRGCKELLLIDTTICRQVYRNRKNLSTAWIDYKKAFDSVPHSWLRRVLKIYKIDDKIYKFLSNCMNQWNTVLNLPGEWQSDTMDCIHIKRGIFQGDSLSPTWFCLALNPLSSALEDSGLGFRFRKENSPISHLLYMDDLKLLASKESDLLSLLKLTHNFSNDIRMEFGIDKCAVVHVRRGKIKNSDNLEISNGITFRSLSETETYKYLGMAEALGINDNNVKENSKEKFMSRLNKVLKSQLSGRNKIKAYNSWVIPSLLYTFGITRWTQTELDALDRRVRTLMTAHRIHHPRSSVMRLYLPRREGGRGLLNIKDLYNTEVYNLRQYFISKKDNLSSIHSDVVISDKSLTPLNMAAMDWSRPHIMNITERKNIWNEKQLHGRFFKILTNPDVDIVSSLHWLRFGDLFAETEGFVCAIQDEVIKTNNYRKYIMRDGTVDVCRACRRPGESLRHVISGCPQLSNGEYLHRHNQVARIVHQQLAIKYGFTQQDVPYYKYEPKPVLENRSVTLYWDRSIITDRFIVANKPDIVVVDRTTRRAIIVDISVPHDENLVKAEKDKQVKYIDLAHEIVALWEVDSTIIVPIVVSVNGLISKNMDGHLSKLGLGKWIKIIIQKAALLNTARIVRRFLSLDA

SEQ ID NO: 32692 - protein, 1205 aa, Hypermnestra helios
MYRTRQQIQMNAANTSTAHTTSPQENPTPMEGNRRGTRRTSVTSLRRRRVPPTGLGPAGNVIPQEDPATDGVVRRRMRWTQEINISVMRAYYKATKGGTSLTSYRPKMLFEFQQLQPSLSNLTAQRLSDQVRVILSRKILDDGILDQLRSEYSTSTIEPIFNLQQILPLAGENNNTNISNTNNNVNINNNNESEKIDQNSFDVDVSSQDSEYMRKTFECSILEYKNIPIENRPKLPKLPYHRKTILTVASMNVICKDYFENCDSILDIMSLLYCCAHTVCIILNIPLISVQSSKKKNNSEPKWKMRIKARIESTRKIIGKLISYQTGNRRNKILALVNQIANEIKISQSDPRFPDKITEYIDTLKQKLKAWANRIRRYSERSKRYFQNRTFESNQKWVYRSWENTAPNNGTDNRPSLNECLNFWKNIWSNEVSHDEDEWIGATERVCCNLTSMGPISITAEDVYTITRKLHNWKSPGPDGIHNFWLKWITNSHTRLAAQIQDAIECCELPRLLTTGITHLLYKNGDTADPKNYRPITCLSTTYKLITAILNNKIYNHLEKNNILSIAQTGCRKGSRGCKELLLIDTTICRQVYRNRKNLSTAWIDYKKAFDSVPHSWLRRVLKIYKIDDKIYKFLSNCMNQWNTVLNLPGEWQSDTMDCIHIKRGIFQGDSLSPTWFCLALNPLSSALEDSGLGFRFRKENSPISHLLYMDDLKLLASKESDLLSLLKLTHNFSNDIRMEFGIDKCAVVHVRRGKIKNSDNLEISNGITFRSLSETETYKYLGMAEALGINDNNVKENSKEKFMSRLNKVLKSQLSGRNKIKAYNSWVIPSLLYTFGITRWTQTELDALDRRVRTLMTAHRIHHPRSSVMRLYLPRREGGRGLLNIKDLYNTEVYNLRQYFISKKDNLSSVHSDVVISDKSLTPLNMAAMDWSRPHIMNITERKNIWNEKQLHGRFFKILTNPDVDIVSSLHWLRFGDLFAETEGFVCAIQDEVIKTNNYRKYIMRDGTVDVCRACRRPGESLRHVISGCPQLSNGEYLHRHNQVARIVHQQLAIKYGFTQQDVPYYKYEPKPVLENRSVTLYWDRSIITDRFIVANKPDIVVVDRTTRRAIIVDISVPHDENLVKAEKDKQVKYIDLAHEIVALWEVDSTIIVPIVVSVNGLISKNMDGHLSKLGLGKWIKIIIQKAALLNTARIVRRFLSLDA

SEQ ID NO: 32693 - protein, 1394 aa, Choaspes benjaminii
MRLRSRNTLPQAGTSNGESRPEQNATGSLMYSGGGTVSLEPAQSETVAVVSDAELSRRARIEEHITADNNPCPLSPSSSFSLFSSIPSSPHSFSSGVMAHVSPNLSLSSSVDVVQEALADKPVSATEGPRARRKWTEEMNSFILRTYFIITKLETDVRTYLTPLHIHFTERFPHIRVSKQRIGDQRRAIVRNSLLSDDKIKEIRKEAQILLQANTSSTQSLTTTQQHTTNTQQRLKWTDDLNKAIIREYYRITQLETNKTAYRPALHQSITSQFPHIAHVTEQRVSDQLRVILRNKMLNDEVIQHIRDEVKKELGSQFNHNIYTHYSGRYMGPFNTDIQTTITNTQPLDTITLHSHNNVEESEEVLNVQPNDIANLTSERPNVEPQQRPPENASDIETTFLNALEKFKKFEPSARPCIPKLKTSKKLMQIVHFINNILFKYLTPDDDFNTVHTAIYCAAYTTAIHTGVKVRDTQNKTYKQVTPFWEQRLQKRIEDLRVKIGRLTEYIKGNRSNTLSKHINSIKKQYRVHAQYEYDNTEMAHFLDTLKQKLRALANRLRRYKQTTLRKSQNRHFTNNQKLFYRNMDSEPLNNTVTNNIDIPSPDYLHSFWAEIWSKPVHHTENNWIQNEKESLRTLTDMEFDEIDMTLLQNVISKTHNWKATGSDKIHNFWYKKLTAVHKFLLPHINTFIKTPNTLPRFITQGITYMIPKEKTDLKDPAKYRPITCLQNIYKIITSCISELIYTYIDTHNILTEEQKGCRKRSQGCKEQLTIDAIISKQAHKNKRNIYTMYIDYKKAYDSIPHSWLLYVLKHYKISPIIINFLQNTMQTWNTTLKLNINNSTVETPLIEIKRGIFQGDALSPLWFCLALNPLSYLLNNTKMGFKLKYDNTYHTLSHLLYMDDIKLYSTNLKEINTLADITKAFSDDIQMMFGIDKCKIQSVQRGKIIKNTYRLNNGDQIDPVNEYTGYKYLGFQQSQQVHHKYIKTTLINKFRIRLNKILHTQLNAQHTTKAINTYAIPLLTYSFGIIRWSQSDLKNLQRIVNTTLTKNRKHHPRSCIQRLTLPRREGGRGLIDIQNLHNKQITTLRHFFHTRASTSILHSAVSKADNNYTPLNLKEQDRQPNENLTQLIEKHRAWSQKSLHGRHHHDLSHPEIDNIASNAWLTRGQLFPETEGFMMAIQDQVIETRNYRKHIIHDSSTVDICRHCHNTTETIQHITGACRAITQTDYKHRHDQVAAIIHQYLALKYNLITDKTAYYKYKPQTVLDSRHYKLYYDRTIITDKTVHYNRPDITLHDKDRKTVYLIDIAIPNTHNLLPTHSEKIRKYSDLTIEIKSQWKVNTVKTIPIILSSTGIIPKTLHTSLANLNIHPLTFITLQKAVILNTCRIVRKFLSIDY

SEQ ID NO: 32694 - protein, 925 aa, Hasora badra
MDSYNNRRQKVTPAWQKRLKKRIDKLRVKIGRVTEFINGNRNNKLIQHINLIKKHYRIHAQYENDNTEMPHFLDTLKQKLRALANRLRRYQQTTLRKSQNRQFTNNEKQFYRNMESELSNNAVTNNTETPSPDALHSFWAEIWAKPVNHTENNWIQNEKESLRSLTDMEFDKVDINLLQDVIAKTHNWKATGSDKIHNYWYKKLTSTHTILLTHINTFIRSPNTLPCYITQGITYMLPKDKTDLKDPAKYRPITCLQNIYKIITSCISQLIYVHIDSHNLLTEEQKGCRKHSQGCKEQLTIDAIVSKQAYKNKRNIYTMYIDYKKAFDSVPHSWLLYVLKHYKISPMIINFLQNTMQTWNTKLKLNINNIVLETPSIKIKRGIFQGDALSPLWFCLALNPLSNLLNRSKAGFKLKYDNTHHTLSHLLYMDDIKLYGSNLKEINTLADITKMFSEDIQMEFGISKCKTQSIQRGKLVENTYQLNSTEKIDPLDEHTGYKYLGFQQSQQIHHKVTKTTLIKKFRLRLTKILHTQLNAQHTTKAINAYAIPVLTYSFGIIRWSQSELKNVQRIVNTTLTRNRKHHPRSCIQRLTLPKTEGGRGLIDIQNLHNKQITTLRHFFHTRASTSILHQAVSKADKNHTPLNLIDQCRQNNEKITESKEKIHVWSQKSLHGRHRNDLTHPDVDKAASNAWLKRGELFPETEGFMMAIQDQVIETRNYRKYIIRDNSTMDICRHCHNNTETIQHITGACRAITQSDYKHRHDQVAAIIHQYLALKYKLIPEKTAYYKYKPQTVLDSTHYKLYYDRTIITDKTVHYNRPDITLHDKSNKIVYLIDISIPNTHNLSSTHSEKIRKYSDLTIEIKSQWKVKTVKTIPIILSSTGIIPKTLHKSLLNSNIHPLTFITLQKAVILNTCRIVRKFLSIDSS

SEQ ID NO: 32695 - protein, 919 aa, Gonatopus flavifemur
MRGRRPEGRVGGARGEGERLDREVNGRPLDGARDPVREATRMQALYRANRRRAVQEVLQGPSHHCQVQKERIEQHFLDVHAGEEAFEPVPPAYRLAALDGADTEALEIPFAPGEVDRRIRRMTNSAPGPDGLTYRDLRGGDPGSVLLASLFNACYRIGRIPDTWKTSNTVLVYKKGDRDDLSNWRPLAMGDTMPKLMAAVMADRLTGWVVRHGRLDPAQKGFLPHEGCYEHNFVLQEIIQDAKRHKKQAVVAWLDLSNAFGSVPHATIENALVHSGMPHGFLNIWKSMYHECVTRVRTAEGYTGPIPIRRGVRQGCPLSPVTFNLALESVLRKLDGLGAGYTIQGQRRNRLAYADDVALIADTPEGMRELLRAVEAESIGLRFNPAKCATLHIGGTARGGVRPTVFGLMGADIRPLETEEAYVHLGVPTGYQVRQTPISDIDQLIGDLGVVDRSLLAPWQKIETVATFLLPRLDFLLRGAHVEKKPLKTADDLIKKVVKSWLNLPQRASAEVVYIPPSKGGCGLLPLADLADLLTVAHSFRFLNADDESVSMLAWDTLRQAVRDKIGRPASGEDLAKYLSGSLEGEFRRDAQMGSMWSRVRNAIMRQSKKAGITWRWSAELVELQLVCPGAEGRPVVIPPGAKKQVIHRVRAAVTQRYLVSLLAKKDQGKVADVSVRSNVSNHFFRTGSFTRFAEWRFIHRARLDVLPLNGARRWGDGDKRCRRCGSGLETLPHVICHCPPHSAAIQYRHNAVLDRLSAACRLPGEKKVNRRIEGVVRDFGGLRPDLVIRHEPSKSIVIVDVTIPFENRREAMWEARERKFAHYAPLAEHLRSKGYRVAVHAFVIGALGSWDPSNEGVLRLLNISTRYAQLMRRLMVSETIRWSRDIYVKHVSGARQYQAPSAPRRLAGAEAAQEIPVD

SEQ ID NO: 32696 - protein, 920 aa, Gonatopus flavifemur
MRGRRPEGRVGGAREEGERLDREVNGRPLDGARDPVREATRIQASYRANRRRAVQEVLQGPSHHCQVQKERIEQHSLDVHAGEEAFEPVPPAYRLAALDGADTEALEIPFAPGEVDRRIRRMTNSAPGPDGLTYRDLRGGDPGSVLLASLFNACYRIGRIPDTWKTSNTVLVYKKGDRDDLSNWRPLAMGDTMPKLMAAVMADRLTGWAVRHGRLDPAQKGFLPHEGCYEHNSVLQEIIQDAKRHKKQAVVAWLDLSNAFGSVPHVTIENALVHSGVPHGFLNIWKSMYHECVTRVRTAEGYTGPIPIRRGVRQGCPLSPVTFNLALESVLRKLDGLGAGDTIQGQRRNRLAYADDVALIADTPEGMRELLSAVEAEAESIGLRFNPAKCATLHIGGTARGGVRPTVFGLMGADIHPLETEEAYVHLGVPTGYQVRQTPISDIDQLIGDLGMVDRSLLAPWQKIETVATFLLPRLDFLLRGAHVEKKPLKTADDLIKKVVKSWLNLPQRASAEVVYIPPSKGGCGLLPLADLADVLTVAHSFRLLNADDESVSMLAWDTLRQAVRDKIGRPASGEDLAKYLSGSLEEFRRDAQMGSMWSRVRNAIMRQSKKAGITWRWSAELVELQLVCPGAEGRPVVIPPGAKKQVIHRVRAAVTQRYLVSLLAKKDQGKVADVSVRSNVSNHFFRTGSFTRFAEWRFIHRARLDVLPLNGARRWGDGDKRCRRCGSGLETLPHVICHCPPHSAAIQYRHNAVLDRLSAACRLPGEKSVNQRIEGVDHDFGGLRPDLVIRHEPSKSIVIVDVTIPFENRREAMWEARERKFAHYTPLAEHLRSKGYRVAIHAFVIGALGSWDPSNEGVLRLLNISPRYAQLMRRLMVSETIRWSRDIYVEHVSGARQYQAPSAPRRLAGAEAAQETSGD

SEQ ID NO: 32697 - protein, 798 aa, Gonatopus flavifemur
MTNSAPGPDGLTYRDLRGGDPGSVLLASLFNACYRIGRIPDTWKTSNTVLVYKKGDRDDLSNWRPLAMGDTMPKLMAAVMADRLTGWAVRHGRLDPAQKGFLPHEGCYEHNFVLQEIIQDAKRHKKQAVVAWLDLSNAFGSVPHAAIENALVHSGVPHGFLNIWKSMYHECVTRVRTAEGYTGPIPIRRAVRQGCPLSPVTSNLALESVLRKLDGLGAGYTIQGQRRNRLAYADDVALIADTPEGLRELLSAVEAESIGLRFNPAKCATLHIGGTARGGVRPTVFGLMGADIRPLETEEAYVHLGVPTGYQVKQTPISDIDQLIGDLGMVDRSLLASWQRIKTVATFLLPRLDFLLRGAHVEKKPLKTADDLIKKVVKSWLNLPQRASAEVVYIPPSKGGCGLLPLADLADVLTVAHSFRLLNADDESVSMLAWDTLRQAVRDKIGRPASGEDLAKYLSGSLEGEFRRDAQMGSMWSRVRNAIMRQSKKAGITWRWSAELVELQLVCPGAEGRPVVIPPGAKKQVIHRVRAAVTQRYLVSLLAKKDQGKVTDVSVRSNVSNHFFRTGSFTRFAEWRFIHRARLDVLPLNGARRWGDGDKRCRRCGSGLETSPHVICHCPPHSPAIQYRHNAVLDRLSAACRLPGEKKVNQRIEGVDHDFGGLRPDLVIRHEPSKGIVIVDVTIPFENRREAMWEARERKFAHYTPLAEHLRSKGYRVAIHAFVIGALGSWDPSNEGVLRLLNISPRYAQLMRRLMVSETIRWSRDIYVEHVSGARQYQAPSAPRRLAGAEAAQETSGD

SEQ ID NO: 32698 - protein, 800 aa, Gonatopus flavifemur
MTTSAPGPDGLTYRDLRGGDPGSVLLASLFNACYRIGRIPDTWKTSNTVLVYKKGDRDDLSNWRPLAMGDTMPKLMAAVMADRLTGWAVRHGRLDPAQKGFLPHEGCYEHNFVLQEIIQDAKRHKKQAVVAWLDLSTAFGSVPHATIENALVHSGVPHGFLNIWKSMYHECVTRVRTAEGYTGPIPIRRGVRQGCLLSPVTFNLALESVLRKLDGLGAGYTIQGQRRNRLAYADDVALIADTPEGMRELLSAVEAEAESIGLRLNPAKCATIHIGGTARGGVRPTVFGLMGADIHPLETEEAYLHLGVPTGYQVRQTPISDIDQLIGDLGMVDRSLLASWQKIETVATFLLPRLDFLLRGAHVEEKPLKTADDLIKKVVKSWLNLPRRASAEVVYIPPSKGGCGLLPLADLADVLTVAHSFRLLNADDESVSMLAWDTLRQAVRDKIGRPASGEDLAKYLSGSLGGEFRRDAQMGSMWSRVRNAIMRQSKKAGITWRWSAELVELQLVCPGAEGRPVVIPPGAKKQVIHRVRAAVTQRYLVSLLAKKDQGKVADVSVRSNVSNHFFRTGSFTRFAEWRFIHRARLDVLPLNGARRWGDGDKRCRRCGSGLETLPQVICHCPPHSAAIQYRHNAVLDRLSAACRLPGEKKVNQRIEGVDRDFGGLRPDLVIRHEFSKNIVIVDVTIPFENRREAMWEARERKFAHYTPLAEHLRSKGYRVAVHAFVIGALGSWDPSNEGVLRLLNISPRYAQLMRRLMVSETIRWSRDIYVEHVSGARQYQAPSAPRRLAGAEAAQETSGD

SEQ ID NO: 32699 - protein, 1073 aa, Gonatopus flavifemur
MRSVESRCGSRRYGTREKPREGGYAGCSGRWGCRFAGEGVGEGRPVAGPSSGRRAGPPGGRGRRGGRPERPVAGPRGPEAAPSVGVRGRSTAAARRAERDQLVLAADSVASAEALGELADQVRRFFQASTNTGGAPGARGATPGRGARPGGGMRGRRPEGRVGGARGEGERLDREVNGRPLDGARDPVREATRIQALYRANRRRAVQEVLQGPSHHCQVQKERIEQRFLDVHAGEEAFEPVPPAYRLAALDGADTEALEIPFAPGEVYRRIRRMTNSAPGPDGLTYRDLRGGDPGSVLLASLFNACYRIGRIPDTWKTSNTVLVYKKGDRDDLSNWRPLAMGDTMPKLMAAVMADRLTGWAVRHGRLDPAQKGFLPHEGCYEHNFVLQEIIQDAKRHKKQAVVAWLDLSNAFGSVPHATIENALVHSGVPHGFLNIWKSMYHECVTRVRTAEGYTGPIPIRRGVRQGCPLSPVTFNLALESVLRKLDGLGAGYTIQGQRRNRLAYADDVALIADTPEGMRELLSAVEAEAESIGLRFNPAKCATLHIGGTARGGVRPTVFGLMGADIRPLKTEEAYVHLGVPTGYQVRQTPISDIDQLIGDLGMVDRSLLAPWQKIETVATFLLPRLDFLLRGAHVEKKPLKTADDLIKKVVKSWLNLPQRASAEVVYIPPSKGGCGLLPLADLADVLTVAHSFRLLNADDESVSMLAWDTLRQAVRDKIGRPASGEDLAIYLSGSLEGEFRRDAQMGSMWSRVRNAIMRQSKKAGITWRWSAELVELQLMCPGAEGRPVVIPPGAKKQVIHRVRAAVTQRYLVSLPAKRDQGKVADVSVRSNVSNHFFRTGSFTRFAEWRFIHRARLDVLPLNGARRWGDGDKRCRRCGSGLETLPHVICHCPPHSAAIQYRHNAVLDRLSAACRLPGEKKVNQRIEGVDRDFGGLRPDLVIRHEPSKSIVIVDVTIPFENRREAMWEARERQFAHYTPLAEHLCSKGYRVAIHAFVIGALGSWDPSNEGVLRLLNISPRYAQLMRRLMVSETVRWSRDIYVEHVSGARQYQAPSAPRRLAGAEAAQETSGD

SEQ ID NO: 32700 - protein, 921 aa, Gonatopus flavifemur
MRGRRPEGRVGGARGEGERLDREVNGRPLDGARDPVREATRIQALYRANRWRAVQEVLQGPSHHCQVQKERIEQHFLDVHAGEEASEPVPPAYRLAALDGADTEALEIPFAPGEVDRRIRRMTNSAPGPDGLTYRDLRGGDPGSVLLASLFDACYRIGRIPDTWKTSNTVLVYKKGDRDDLSNWRPLAMGDTMPKLMAAVMADRLTGWAVRHGRLDPAQKGFLPHEGCYEHNFVLQEIIQDAKRHKKQAVVAWLDLSNAFGSVPHATIENALVHSGVPHGFLNIWKSMYHECVTRVRTAEGYTGPIPIRRGVRQGCPLSPVTFNLALESVLRKLDGLGAGYTIQGQRRNRLAYADDVALIADTPEGMRELLSAVEAEAESIGLRFNPAKCAILHIGGTARGGVRPTVFGLMGADIHPLETKEAYVHLGVPTGYQVRQTPISDIDQLIGDLGMVDRSLLAPWQKIETVATFLLPRLDFLLRGAHVEKKPLKTADDLIKKVVKSWLNLPQRASAEVVYIPPSKGGCGLLPLADLADVLTVAHSFRLLNADDESVSMLAWDTLRQAVRDKIGRPASGEDLAKYLSGSLEGEFRRDAQMGSMWSRVRNAIMRQSKEAGITWRWSAELVELQLVCPGAEGRPVVIPPGAKKQVIHRVRAAVTQRYLVSLLAKKDQGKVADVSVRSNVSNHFFRTGSFTRFAEWRFIHRARLDVPPLNGARRWGDGDKRCRRCGSGLETLPHVICHCPPHSAAIQYRHNAVLDRLSAACRLPGEKKVNQRIEGVDRDFGGLRPDLVIRHEPSKSIVIVDVTIPFENRREAMWEARERKFAHYTPLAEHLRSKGYRVAVHAFVIGALGSWDPSNEGVLRLLNISPRYAQLMRRLMVSETIRWSRDIYVEHVSGARQYQAPSAPRRLAGAEAAQETSGD

SEQ ID NO: 32701 - protein, 1226 aa, Entheus sp.
MSKRNLNHWPLPGGDRRGTSGASAGRYSMRSASDREFSQRATVEQRATADPIDHNQTSSIPSTLARSVLQEMLPATTLAGQNRQRMKWTDEVNRQLLRCYYIVTEFETNLTGYRPLLHKKFLEIFPELQSLTEQRLADQIRVIHRNNRITASERGNIKRELQLQVNRTDIHTTTNDITEMPINCNQTQQNHNNIQLTQDLLSPQIPISYTTQNEISQTQTSTINPDGYQEEYDTLNNIFQETLIKYNHTDPTTRPLIPKLQMVGTTYKLTIDKLNSIVENTLKNYTIPTLEDLQTLIYAAAVTVVLRHDKKAMKPTHNTTDKHKASSKPPWERRLEKSISILRKEIGQLTQYINGNLSDKKQRKINQKNKTIDETKQELDKKKQTLQAKAKRLRRYKKSNKRCQDNKNFQNNQKLFYRKLNQEDITIKEAPPIDEISKYWSNIWENPIEHNDSALWIQEEEKRIENIDSMTEVHITVTDITNATMKTHNWKAPGPDKIQNFWLKVFTSIHQPLANIFNSLIQDPYKTPTFLTQGITYLKPKSNDTKNPSKYRPITCLPTIYKLLTSIITDKIYTHASYNNIIAEEQKGCYKGGRGCKEQLVIDSEVITQAKIKQRNLYYAYIDYQKAFDSVPHTWLLKTLALYKIDPKLIHFMEIVMKNWSTALNIKTEKQNYQSTSIRIKRGIFQGDSLSPLWFCLALNPLSQTLNNSKYGYTIRKDDSYKITHLLYMDDIKLFSATRHQLNYLLKITENFSNDIKMQFGIDKCKINSIVRGKHANQEPYSLQSTPDIIESLNKNNIYKYLGFNQSNEIDHSKIKFELKNKYITRLTTILKTGLSARNKIKAINTYAIPVLTYSFGIIRWSDTELQALNTTTRTTCNKHHIHHIHSAVERFTLKRKDGGRGIVDIYNLCYSQIINLRNYFTHRSNNSRLHKAICNIPTSGTPLQLNNDEFDPSIRLVKDETKIHNWKCKALHGKHIHQLNQDHINNEASNSWLTKGNIYAETEGFMIAIQDQTINTKNYQKYIIKDPAVTTDACRLCHKSQETIDHITGGCQFLATRQYTDRHNNVAKQIHIELAKKYNLIKINEPYYKYKPDVILENSIAKLYWDRDIVTDLTTPHNRPDITLTIKATKITYLIDISIPNTTNLKQKHSEKIQKYIPLSDEVKDMWHQDTVKIVPIIISSTGVIPKNLDTALKTLDLRKSLYINLQKSVIIDTCSIVRRFLNHS

SEQ ID NO: 32702 - protein, 1217 aa, Lobocla liliana
MRTASGRVFSRRATDQQRATADPIDQNLITTTPCTSARSVLEEMLPATTLAGQSRQRMKWTDEVNRQLLRCYYIVTDFENNLTGYRPLLHAKFLTIFPELHSITEQRLADQIRVIHRNNRIPLSERENIKLKLQQEQSNNVTNTKSTNNYNTNTLHNCISIQSNNNVKSQLTLETQSSEVPINNILHEEGRTPLQENSTLTPIIQADGYQEEYDKLINIFQETLTKYNQTDPTKRPTIPKLRMVGKYRHTIDKLNTIIQNTLEDVSHSNLEDIHTLIYAAAVTVTTIHNKQLSQPNQNSIKKQIKPFKPPWERRIEKSISILRKEIGQLTQNINGNLSQKKQNKINPKNKTLDELKQELDKKKQTLQAKAKRLKRYKKSYERKQDNANFNSNQKIFYRKLNQEEIIIKETPPKKELEKYWCNIWENAIEHNDDAHWIEKEEKRVEQIDQMTETIITAADVTNATKKIHNWKAPGPDRIQNFWLKVFVATHQPLADMYNSIIQDPLQAPSFLTQGITYLKPKSSDTKNPSKYRPITCLPTIYKLLTSIIAEKIYTHTFKNKIIAEEQKGCYKGGRGCKEQLVIDSEIHTQAKIKHRNLYYAYIDYQKAFDSVPHTWLIRVLTLYKIDSRLINFLQVIMKTWSTTLNIKTENQSIQSNTIHIKRGIFQGDSLSPLWFCLALSPLSQALNNSKYGYVIQKDDSYKITHLLYMDDIKLFSATRHQLNYLLKITEEFSKDIKMQFGTDKCKINSIVKSKHSNQSPHDLYFTPDTVESLNINETYKYLGFHQRNEICHSKIKEDLKNKYNIRLKTVLKTELFARNKIKAINTYAIPVLTYSFGIIRWSDTELQALNTLTRTTCNKHHIHHIHSAVERVTLKRKEGGRGIIDIHNLHYNQIINLRNYFKHRSTHSPLHKAICNITTSGTPLKLNNDEFDPTTKIITDETKKHSWKSKALHGKHAHFLYQDHINLEASNSWLTKGNIYAETEGFMIAIQDHILNTKNYQKYIIKDPTVTTDSCRLCNKSQETVDHITGGCQFLATRQYTERHNNVAKQIHSELARKYDLIQITEPYYKYKPNNVLENSQAKLYWDRDIITDLTTPHNRPDITLTIKATKTTYLIDISIPNTSNLKQKHSEKIQKYIPLADEIKQMWHQDTVKIVPIIISSTGIIPNTLETALQTLSLRKSLYVNLQKSVIINTCSIVRRFLNPLTEINNHLQNNQ

SEQ ID NO: 32703 - protein, 1243 aa, Polyctor polyctor
MSRNNLNHEPLPGGDRRGTSGAGAGRYSMRTASGRVFSRRATDQQRATADPIDQNKNSISPHTSAENVLQEMLPATTLAGQSRQRMKWTDQVNRQLLRCYYTVTQFENNLTGYRPLLHKMFLSIFPELQSITEQRLSDQIRVIHRNNRIPLSERENIKKELQQEQINNENNLSDVNSATDIITNTLHINNFQQSPDQTINSNTPHAEAILVESTQENSTQTLTTHPEGYQEQYDKLLNIFQETLTKYSQTDPTSRPVIPKLQMVGKYRLTIDKLNTIIQNTLKDITNPTLEDIHTLIYAAAVTVTRSHKILPSQVAYHSKYHNQNSINKQNSSFKPSWERRIEKSISILRKEIGQLTQYINGNLSKKKQNKINPTNQPIEEMKLKLDKNIQKLQAKAKRLKRYKKSNERRQDNAKFNNNQKLFYRKLNQEEIIIKETPLKEELEQYWSNIWENTINHNNNAQWIEDEEKRVEHIDPMTETVITVEDIAIATKKTHNWKAPGPDKIQNFWLKVFVAVHQPLADIYNLIIHNPHLAPEFLTQGITYLKPKSNDTKDPSQYRPITCLPTIYKLLTAVIAQKIYTHAFKNKVIAEEQKGCYKGGQGCKEQLVIDSEIHAQSKTHHRNLYYAYIDYQKAFDSVPHSWLIKVLSLYRIDSNIINFLETIMKNWSTTLNIKTEKQTLQSNRININKGIFQGDSLSPLWFCLALSPLSQTLNNNNYGYLIQKNSYKITHLLYMDDIKLFAATKHQLNCLLHITEEFSKDIRMQFGIDKCKINSIIKGKHADQEPYKLHFKSETIESLNKNDTYKYLGFNQRHEIEHSKIKQELKNKFTIRLKTILKTELSARNKIKAINTYAIPVLTYSFGIIKWSDTDLQALNTLTRTTCNKHRIHHIHAAVERFTLKRDEGGRGIIDIYNLHYNQIINLRNYFKQRSSNSPLHKAICNITTSGTPLKLNNDEFDPITKIITDDTKKHNWKCKALHGKHAYYLNQDHINFKSSNAWLTTGNIYAETEGFMFAIQDHILNTRNYQKYIIKDPKVTTDTCRLCNKSQETVDHITGGCQFLATKQYTHRHDNVAKQIHSELAKKYNLVKSTEAYYKYKPTSVLENSQVKLYWDRDIITDLTTPHNRPDIILTIKAAKTTYLIDISIPNTSNLKQKHSEKIQKYIPLADEIKQMWHQDVVKIVPIIISSTGIIPKNLEIALQTLELRKCLFINLQKSVILETCSITRRFLSFNTDFKSCHQNQQ

SEQ ID NO: 32704 - protein, 1327 aa, Quadrus cerialis
MEKSQKRKYNLRSLPGGRRGTPGVGAGCDSMRTTDGLELSRRAPAGHDPEITTADIISNRSSPISSTHSLFQSPSSSPHSYENPSTSRSTTTSPMSINVSRGLLANSLVPIIDTTSAAQGFEIDTCNNGAPINNFTRSLTPSTTSIPDRPPRSVLQEMFPATTLGGKSRQRMKWTDEINCQLLRCYYIITDCEKNLTGYRPILRKKFLDIYPELHTITEQRLADQIRVIHRNNRILPCDRESIKKEVQTLNSNINIEQCLQNNSNVNTQTQDNYNQIQSNNTITQPIFTHMLLSSHNNTIQDQETIQTQDKNKNNPSTDSEEYQKQYEKLLHTFQEILMKYNQTDPTTRPTIPKLHMVGKYRQTIDKLNTIIENTLKDMTNPTLEDIHTLIYAAAVTVTTEHNLLKSPNATKKQNNISKPPWERRLDKCISILRKQIGQLTQYINGRLSEKKQKKVNPNNRSKEEIIQELDKKKQTLQAKAKRLRRYRLSNQRRQDNINFNKNQKIFYRKLNKDEISITEAPKIEEIENYWKSLWETTTDHKDTAAWIEKEEKRVHNIEQMPEFSITLEDITNATKKTHNWKAPGPDKIQNFWLKVFIAIHQPLTNIFNLLVQDPLQAPPFLTQGLTYLKPKSSDTNNPAKYRPITCLPTIYKLLTAILTEKIYTHALKNNIIAEEQKGCYKGGRGCKELLVIDSEIHTQAKLKQRNLYYAYIDYQKAFDSVPHSWLIKILTLYKIDPKVINFLKVIMQQWSTILNLTTEKDSIRSKLIHIKKGIFQGDSLSPLWFCLALSPLSQTLNNSKYGYALKKKDGYKISHLLYMDDIKIFSATRNQLNHLLNITENFSQDIRMQFGVEKCKINRVVKGRHIDQEPYKLHYTPETIESLNTNDTYKYLGFHQSNEMKHSKIKEELKNKYTTRLKTILKTQLSARNKTKAINTYAIPVLTYSFGIIRWSDTELQALNTLTRTTCNKYHIHHIHSAVERFTLKRREGGRGIIDIFNLHHRQIINLRDYFKKRINDSPIHKAVCTINTTGSPLQLNNEEFDPKIKIITDDIKIRNWKSKALHGKHAHYLHQDHVNLEASNRWLTKGNIYAETEGFMIAIQDQIINTKNYQKYIIKDPAVTTDACRLCHKSQETIDHITGGCHFLATRQYTDRHNNVAKQIHSELAKKYDLIQNIEPYYKYKPSKVLENSKVKLYWDTDIITDLTTPHNRPDITLTVKSTKITYLIDISIPNTSNLKQKHTDKIQKYVPLAEEIRDMWHQNTVKIVPIIISSTGIIPTTLEVALQNLDLRKSLYTNLQKSVILDTCSIVRRFLNPSTEINNHLHIN

SEQ ID NO: 32705 - protein, 1263 aa, Cabirus procas
MRLRSRQIPQAGTREGESRPELSSPGCPSYSGGGNVSHMTTQSSTVVVHHPSSPVSSTHTSFQSPSSSPHSYETQLISSRSTTVTPLSGDFFIDQINQNQPLSTPTRSVLQEMLPATTLAGQSRQRMKWTDEVNRQLLRCYYTVTNFETNLTGYRSSLHKKFLEIFPELQSITEQRLADQIRVIHRNNRITPSERDNIKRELQSQTESKNTTTNINFNDISPSATETNVDNTTQAEGHTQTQLHDVQTSTSNPKEYQEQYDKLSNIFHETLTKYNQTDPTTRPPIPKLQMVGKYRQTIDKLNTIIQNILKDITCPTIGDIHAIIYAAAVTTITEHNKNLTKTQSTSKKHNGQLKPPWERRLDKSISVLRREIGQLTQYINGNLSEKKQNKIHSNNKTIDEIKQELDKKKQTLQAKAKRLRRYKKSNERRQDNRNFNNNQKLFYRKINQEEIIIKETPSIEVVEQYWSSIWERTLDHNEAADWIGKEEKRVEHISPMTEISITVEDIHNTTKKIPNWKAPGPDKIQNFWLKVFSSVHQSLANIFNSIINDPYRAPIFLTQGITYLKPKSNDTKNPSKYRPITCLPTIYKLLTSIIAEKVYAYALKNNIIAEEQKGCYKGGRGCKEQLVIDSEIHTQVKTKHRNLYYAYIDYQKAFDSVPHSWLIKVLTLYKIDPKLTHFLKIITKNWSTILNIKTENENLQSNRIHIQRGIFQGDSLSPLWFCLALSPLSQILNNSGYGYMIHKENSCKITHLLYMDDIKLFSATRQQLNCLLKVTEQFSNDIRMQFGIEKCKINRIIKGKHADQEPYSLHCTPEIIESLNIDDTYKYLGFNQNNEIKHSKIKEELKNKYKTRLKTILKTELSARNKTKAINTYAIPVLTYSFGIIRWSDTELQALNTLTRTTCNKHNIHHIHSAVERFTLKRKEGGRGIVDIYNLHYRQVTNLRNYFNQRSSNSPLHQAICKINTSGTPLQLNNYEFDPMAKIVTNETKKHNWKSKALHGKHAQQLNQEHVNHEASNSWLTKGNIYAETEGFMVAIQDQIIKTKNYQKYIIKDPAVITDTCRLCHKSQETVDHITGGCQFLATKQYTDRHNNVAKQIHMELAKKYDLIQTTEPYYKYKPSSVLENSKAKLYYDINIITDLTTPHNRPDITLTIKATKTTYLIDIAIPNTHNLKQKHTEKIQKYIPLADEIKEMWHQSTVKIVPIIVSSTGIIPKTLEIALQSLQLSKYLYIKLQKSVIIDTCSIVRRFLNPSSEIHNHSHSDQ

SEQ ID NO: 32706 - protein, 1326 aa, Gindanes brontinus
MRLRNREIPQAGTREGESRSEPSSSGCPTYSGVGNVSHMTAQSQTVAVDNRTSHSQVISSPSSSIASTQSLFQSPPSSSHSYEVCNTSSGSNTSTSLSCDVAQEAYAKFPVPITDNTCHARIIQKNIDNRVHQQTNSLSLDMNTPVRSVLQEMLPATTLAGQNRQRMKWTDNINHQLLRCYYIATDCERNLTGYRPLLHKKFLDIFPELQSITEQRLADQIRVIHRNNRIPLSERELIKRELQSQARCISENKYINVDNDNSYVNNAKTHENYNEGQLTRSVSKQTTTSNNSNNPDRDTIHTQENKDDSCRTDAREYEQVHNKLLNKFQEAYIKYNYTDPTSRPTIPKLQMVGKYREIVDKLNTILENILKDMTKPTLEDIHTLIYAAAVTVTATHNKLFTKPTPITTNKQNPLSKPPWERRLEKSILTLRKEIGQLTQYIIGNLSQKKQKKMNPNNKTKDEIKQELDKKKQTLQAKAKRLRRYKKSYQRRKDNINFINNQKLFYKKLNKEEITIKEAPKIEEVENYWRNIWERPVDHNDSAAWIEREERRVENMSQMSEISIKIEDVTNAVKKSHNWKAPGPDGIQNYWLKVFTAAHQPLADIFNVIIQDPLQAPPFLTQGLTYLKAKSSETKNPAKYRPITCLPTIYKLLTAILTDKIYTHAFKNNIIAEEQKGCYKGGRGCKEQLVIDTTIHTQAKIKHRNLYYAYIDYQKAFDSVPHTWLIKILTLYKIDSKLIHFFRVIMKRWSTMLNIKTEKENLQSTPIHIRRGIFQGDSLSPLWFCLALNPLSQILNSSKHGYTTYKEDGYRITHLLYMDDIKLFSATRPQLNHLLNITEQFSQDIRMQFGIDKCKISRIIKGKHVDQEPYRLQYTPEILESLNINDTYKYLGFHQSNDIDHSKIKGELKHRYATRLKAILSTHLSGRNITKAINTYAIPVLTYSFGIIRWSDTELHALNTLTRTTCNKYNIHHIHSSVERFTLKRKKGGRGIVDIYNLHYNQIKNLREYFKNRSSNSKFHLAICKINTLGSPLQLNNDEFDPKTKIITDETKICKWKSKSLHGKHAYQLNQDHVNSEASNTWLTNGNIYAETEGFMMAIQDQIINTKNYQKFIIKDPAVTTDACRLCHKSQETIDHITGGCQFLANRQYTDRHNNVAKQLHAELAKKYGFIKTTEPYYKYKPSSVLENSKVKLYWDRDIITDLTTAHNRPDITLTIKSTKTTYLIDISIPNSPNLKQKHNEKILKYVPLADEIRAMWHQNTVKIVPIIISSTGVIPKTLEIALHTLQVRKTLYINLQKSVILDTSSIVRRFLNPSTEINNHIHNNNY

SEQ ID NO: 32707 - protein, 1232 aa, Pholisora mejicanus
MSNTNLSNWPLPGGDRRGTSGAGAGRYSMRTASGRVFSQRATDQQRATADPIDQNPTPPPSTSARSVLQDMLPTTTLAGQNRQRMKWTDEVNRQLLRCYYIVTDFENNLTGYRPLLRAKFLTIFPELQSISEQRLADQIRVIHRNNRIPMSERDNIKRELQNESIIENNVTNVKTTENADNGNDEDLQITLDTQPKERGVSSCGLHEETPLSSPQQNNFTSHSDNYQEEYNKLLNIFEETLTKYNQTDPAMRPTIPKLQMVGKYSLTIDKLNIIIQNALKSISHPTLEDIHTLVYAAAVTVTTSQNTQLENSNQKTGQRKKPFKPPWERRIEKSISILRKEIGQLTQYINGNVSEKKQNKINPKNKTIDELKQELDKMKQTLQAKAKRLKRYKKSYERRQDNANFNNNQKLFYRKLNQEEIIIKETPLKEELEKYWSDIWENKINHNDNALWIQNEEKRVDHINQMTEISISAEDISNATKKTHNWKAPGPDRIQNFWLKVFKAIHQPLADVYNSIIQNPLQAPSFLTQGITYLKPKSSDTKNPSKYRPITCLPTIYKLLTAIIAEKIYSHTFKNNIIAEEQKGCYKRGQGCKEQLVIDSEIHTQAKIKHRNLYYAYIDYQKAFDSVPHIWLIKVLTLYKIDSKLIHFLKVIMKNWSTTLNIKTDKYSIQSNTIHIKRGIFQGDSLSPLWFCLALSPLSQTLNSTNYGYIIHKDDSYKLTHLLYMDDIKLFSATKHQLNYLLKITEEFSNDIKMQFGIDKCKINSIVKGKHADQPPHELYFSPDTINSLNINETYKYLGFHQRNEIEHSKIKEDLKHKYTIRLRTVLKTELSARNKIKAINTYAIPVLTYSFGIIRWSDTDLHSLNTLTRSTCNKHHIHHIHSAVERVTLKRKDGGRGIIDIHNLHYSQIINLRNYFKQRSIHSPLHQAICKIDTSGTPLQLNNDEFDPKSKIITDEIKKRSWKSKALHGKHANYLNQDHINLEASNSWLTKGNIYAETEGFMIAIQDHIVNTKNYQKYIIKDPTVTTDVCRLCNKAQETVDHITGGCQFLATRQYTDRHNNVAKQIHSELAKKYGLTQITEPYYKYKPNSVLENSQVKLYWDRDIITDLTTPHNRPDITLTIKETKTTYLIDISIPNTSNLKQKHSDKIQKYIPLADEIKQMWKQNTVKIVPIVLSSTGIIPNTLKTALQTLDLRTSLYINLQKSVILDTCSIVRRFLNPSTEANNHLQNN

SEQ ID NO: 32708 - protein, 993 aa, Ophraella communa
MEINIRAKLLEIEWVDITKRKKLKQPKNSKELNNQIKIANKVLAKLASDHPLNITELNAHIYAAAAVIAGEADVTARKEKKDPPWKTRLRNKMDNDRKNISILKELQSGVASKHIHRKVDIILRNERIVKYRELQLVVLIQDIKMRLQARSQRLRRYESRCQQFAQNRMFRENTKDFYRRINNQQEVIADPPPQQEVETFWRRILEDDTAHNHEATWIREEDIVYNGITSQNWSELSMPEVSRIIKRTHNWKAAGLDKVQNFWIKRFHVLHQYLVAAMNDILKDPTKMPAWLTTGATFLLYKGKESKNPRNYRPITCLPTMYKLLTAAVSEKLYLHLLSNNILPEEQKGCRKGSRGCKDQLLISKMITEDAKKRKKNLSMAWIDYKKAFDSVPHSWILAALKSCQVSPTVIRFVEESMKVWKTEMYLFHQNGTVQTGKISIKRGIFQGDSLSPLLFCICLIPLSKMINKQGLGYEINERDRVSHLFYMDDLKIFAKNENTMRQALDIVKTFSDDIRMEFGLDKCATIEIKRGKITHSNNMVLNDGSAIKNLVQGDAYKYLGVDESDDIHHTKMKNKASKEYFRRVRLILNSKLNSKNKIMAINSVAVPVPTYSFGILDWKRDEIKKLDGRTRKLLTMHGMHHPKADADRIYIKRRHGGRGLIQLESAYDIAMAGLSEYVEQSPDKFIMMVRRHESSKRKYSLTSIAKETHTRYKTTSEQGNKVGNLRALRGAIERHHIDTVKEKPLHGKFMQHLDKPHIDKEASLAWLQSSNLKGETESLIVAAQDQALNTRYHQRKILGLHVNSKCRVCNASEETVSHILSSCTSLAATEYTHRHNKVASYVHWVICKDLGVEVPDKWYDHNPQAVIETRDCVIMWDHGIRTDRTINANRPDIVLHNRPMKSCLLIDVAIPDDQNIAVKEAEKISKYKDLQIEVQRMWNTRARVVPVVIGTLGSIKKDFYKYLEMIPGKPSAYEAQKITLLGSAHILRRILT

SEQ ID NO: 32709 - protein, 849 aa, Ophraella communa
MRLQARSQRLRRYESRCQQFAQNRMFRENTKDFYRRINNQQEVIADPPPQQEVETFWRRILEDDTAHNHEATWIREEDIVYNGITSQNWSELSMPEVSRIIKRTHNWKAAGLDKVQNFWIKRFHVLHQYLVAAMNDILKDPTKMPAWLTTGATFLLYKGKESKDPRNYRPITCLPTMYKLLTAAVSEKLYLHLLSNNILPEEQKGCRKGSRGCKDQLLISKMITEDAKKRKKNLSMAWIDYKKAFDSVPHSWILAALKSCQVSPTVIRFVEESMKVWKTEMYLFHQNGTVQTGKISIKRGIFQGDSLSPLLFCICLIPLSKMINKQGLGYEINERDRVSHLFYMDDLKIFAKNENTMRQALDIVKTFSDDIRMEFGLDKCATIEIKRGKITHSNNMVLNDGSAIKNLVQGDAYKYLGVDESDDIHHTKMKNKASKEYFRRVRLILNSKLNSKNKIMAINSVAVPVPTYSFGILDWKRDEIKKLDGRTRKLLTMHGMHHPKADADRIYIKRRHGGRGLIQLESAYDIAMAGLSEYVEQSPDKFIMMVRRHESSKRKYSLTSIAKETHTRYKTTSEQGNKVGNLRALRGAIERHHIDTVKEKPLHGKFMQHLDKPHIDKEASLAWLQSSNLKGETESLIVAAQDQALNTRYHQRKILGLHVNSKCRVCNASEETVSHILSSCTSLAATEYTHRHNKVASYVHWVICKDLGVEVPDKWYDHNPQAVIETRDCVIMWDHGIRTDRTINANRPDIVLHNRPMKSCLLIDVAIPDDQNIAVKEAEKISKYKDLQIEVQRMWNTRARVVPVVIGTLGSIKKDFYKYLEMIPGKPSAYEAQKITLLGSAHILRRILT

SEQ ID NO: 32710 - protein, 1082 aa, Ophraella communa
MTMYRAKLHQHFIERIPHLNHLTEQRISDQRRVIIRNNLLSLPTIEQIRAEVQKELNQQEIANEGTHMPTNQNKLPSNSTPQENPSPRPYAINRQTSWTETYQQHLTEYRGSDPTKRPKIPKLIYTPSTRLILATANENIKQNVDATMDLEELQLHIYCAALTTIETNKQKPIKTFRTKTREIPKWEQRLCNKIETLRRDIGRTQQLERGQKSKKLLNTIPAELKKQLQNKTENQIKLIIADFLDTLKQKLAVFSKRLRRYQESYKRKTQNVLFEKNQKEFYRSLNKNHDPKRDSPKKEELQKFWEEIWSKEIKHQDNTPWIEAETQNTNNIQMEEITFTEQDLKKVIQKLANWKAPGNDGIQNFWYKKLTAIYPHLTNQFNNALRDPKTLPNFLCCGTTYLIPKSEQIKDPSQYRPITCLPTMYKIFTAAICDKLYTYLENNNILTEEQKGCKREFLGCKEQITIDNVILEQIRKKNRNLHMAYIDYQKAFDSVPHSWLIKTLEIYKVHPTLINFLKTTMKKWKTAIVINTSQTTMETEYINIKRGVFQGDSLSALWFCLCLNPLSSGLNRTGYGANVKAGRTSKIISHLFFMDDIKLYAANKKHLESNLKLLYEWSTDIGMSFGMKKCQTVTVHKGKIKEETAIELEPGKFIEAMTNKPYKYLGILQTNKIEHKQIKTMLTNEFETRLQKLLKSYLNSRNLTTAINSYAIPALQYSFGIVKWSQTELEAINRKIRTELTKHRKHHPKASVERITLPREKGGRGIKDVVVACSQQIEGLRKFFQQHENHQTIVKADIGYTPLNLSEENFKPFVIEPDENKIEYWRSKQLHGRFINQLKQDTIDQAKSNQWLKSGTLFPETEGFMIGIQDQVIKTRNYQKYILKEEIQTDKCRKCGKNQETVEHILSNCQNLAESKYMERHNKVAAIVYLEIIKKYKLAPENNEPYYKYKPPPVSENEMVKIYWDKTIMTDTTMRHNRPDITVINKQTKEALLIDISIPNNLNINIKYHEKINKYDDLRREIKELWKLQKVKVVPVILSCMGLIPKNLKDALKDIGIPDSTYRLMQKSVILDATNIVRTFLE

SEQ ID NO: 32711 - protein, 1075 aa, Clytia hemisphaerica
MTENYDFNCKDCGNLFQHETEFESHICKYNHVNTKRRQKNKTLIVNKDPSEERNINNGPVAVNTDTLDETVNNDIPAVNTDTSAVNTAIATPAVNTDTLVDDYPNSDDNPDDIDILDMLIETDEIEIVREDDWVANLENYNPSGIINPNKIIYGLKTTDFIEKSNNTYETIIQWRKNLFKLPTGKAGKDFISELTHWLEIFNTEEDLSSIALKVFMILPALLLQKPSKTSKSKDHSEKLANRLKLWKMGNFEDLIREGQEIQKRLQKSKHSQNKDKAKIFSNLMLKGKVGAALKMLSQEEIGVHKVNEQVIQDLQAKHPATQKIPNETLYEGPINKVLPSYFDEIDESMVLKAITLTKGAGGPSHMDAELYRHLLTSKKFKKENKELRNQIAKLARLIATKCIDPHSLESYVACRLIPLDKNPGVRPIGVGEILRRIVGKCVGWVLKDDIQDCAGPLQVATGLQSGAEAAIHSMREIFEQDDTDAIILVDASNAFNSLNKNAALHNMRILCPQFSFILMNTYRIPVRMIIHGTKDIMSVEGTTQGDNLAMSFYAIGIAPIIERLRQTIPSIKNVALADDITGAGNLIELKFWWEKVISEGKKYGYFVNESKSWLIIKDNSQLENAKIIFHDTAIKFTTEGKRHLGAALGSEEFREQYVTEKVKIWCLEMEKLCEYAKTQPHAAYAAFCHGEIHKYTYFLRTIPDMKNFIKPLDDIITQNFIPNLLDSIVTEQERRLYSLPIKKGGLGIPIISETCETQLENSLSISAPLKTVIVEQVETLPDPQTVKNIKNEKKTEKEKILKEKCEHIDQHLSTEMKKAVSDARMPGVSSWLRVLPLSAYGFSLNKGEFRDALKMRYGKELRGLPSQCPCGQKFDVNHALNCKKGGFVIIRHNTIRDFEADLLAEAHKDVETEPVLQPVEGELIAGLAGENARPDIRARGVWRPGQNAYFDVRVTNKSQVNNDTMKTLEKHEREKKRHYNHRIMNIEHGTFTPLVFSVTGVMGKECSMFHKHMADKISKKTEEKYSDIINVLKCKLSFLILRASLLCIRGSRTHKKDSKITDDFTSVFLNANMQR

SEQ ID NO: 32712 - protein, 1017 aa, Ampulex compressa
MPRMPAQKPDNKCNADGPSGSIGPTDIAGVVDPGQTQTTTCRFPDCGRVFKTTRGRGLHEQKAHKNWYDETQANHLVHKKAPWSTEESQRMARHEARLQTAGERFINQALVPLFPHRTLESIKGHRRYPKYKESVQKYILELEKTTEEPALQPENLSTADESWADTIKTHLLQMDPLRGIEYHVTLLNQICQNVITWSTETISDNLEAYIAQTFPAKPREESKLKPKPCSHNRLTRRKLRRIEYAKTQKAWRKNRCNCLRALLSGKTTDNMPDKEVMISFWSEVMKSDDISSPGRSSVDQVNYDLLAPISAGEIKRSLPKLNTASGPDGLSARQLRATPIGVLTRLLNLISLCGKLPKQLLESRTILIPKKDNASEPGEFRPITISPVITRTYHKILAARVMKHVGLDERQRAFIPLDGCARNIFDFDLILRYHRSHFKPLYVASIDIAKAFDSVSHKTIHDTLTAKGLPGPLVAYIMDVYGASTTRLICNGWESDPIHPTCGVKQGDPLSPVIFNLVMDGLIRMIPHEIGVDIDGVHYNILAFADDVVFMASTPQGLQTTLDLAADYLAKCGLKINSTKSFTIAIRSLPHVKKAVVDSKVRFTCLGRELPSVKRADEWKYLGVPFTPEGRSVGSEIEKLSSSLTKLTRAPLKPQQRLFALRVIVLPSLYHLLTLGNTTLSKLKKIDSMVRGAVRKWLNLPHDVINAYFHSNVKDGGLSIPSMRWLMPLHRHQRLKGIVNGERTISPYLTLELDRNRRRLRDGQEVLDNTQKLDRRWAVQLHSAFDGRALKDSRKTPHQHQWITEGTRFLSGRDYMNMIKLRINALPTKSRTTRGRIGERLCRAGCKVAETANHILQQCHRTHGARIARHDAVVSYIRRSLEKQHARVDVEPRLVTPIGLRKPDLIAKQEDSVWVLDAQVVGESTDLEKAHLQKVSYYREVEEPIKHSYGASKIKFSSITLSYRGVWSRASAQDLLDAKTLKHKELMIISTRVLAGGLSSFWTFNKMTARRQRAGIG

SEQ ID NO: 32713 - protein, 1229 aa, Tribolium confusum
MDCQFQTFSPKRDLLRSRTQQSSSFVGSLDDDGARDISSGNDTTRSNLTHSSCGDSHGLSHETTSITRKRKKWTIEMNTFIMRKYFQITKCEKDVSNYRTPLYEAFKSKYPNFQVTAQNVADQRRAIIKNNYIPKEILEQIKFESESPLVSNNLDKSSSPLSRRTESISNIDNLNCDENITNIPLNIQRPEIVPNIFKNTTNVIYTTSTNFTYHINFRNEIEKEFEKSLSEFRNMSITERPNIPKQKITKKFLGIVEIINEFILPKYLIQEQSFTEFHTLIYCAAITSIRSNNSKEFYFSQKFKDNSIPKWELRINSRINLIRTEIGQITQYLRGVNSHHIQKCIDNILRKNRIHCSTYNEYNSTLLEIKDTLVQKLSLYSKRLKRYKENNLRKYHNLQFCNNEKIFYRNLNRPQKSNNGPPDLKQLTSFWQHTWSKDRDFNTSASWINSIKTKTVNQNNMTNFEILYQNLMDTINKSHNWKAPGIDKIHNFWLKKFTCIHSRLLWHFNNFIKNPNTFPQFLTHGVTFLKPKDNDTQNPSKYRPITCLPTLYKILISCITTLIYEYCLQNNIINEEQKGCIKGSFGCNEQLVIDSVIMEQARKCNRNIYSAFIDYKKAYDSVPHSWLINILKIYKIHPTIITFLQYIMKSWETTLNISLNNINLKSEPIAIKRGIFQGDSLSPLWFCLAINPLSDILNSSGYGFNIKNNGQTKSKLTHLMYMDDIKLYSSTERQLKLLLKLTENFSQDIGMSFGVDKCKILAINRGQIKNINYTTQNNEVIENLDQGDFYKYLGFQQSNHIPHNIIKEKLFNEFVSRSKQILKTHLNGKNIMKAINTFAVPVLTYSFGIIKWSKTDISNLNIKTRTLFTKFRKHHPKSAIERFSLSRQNGGRGFLNLQNLHDKQINLLKKYFLERSQENLLFKSICLSDYNYTPLNLSDFRLQEISFDEKLLINTIKEKSLHGRFYKELDDPLIDKEASHIWLTKSNIHPETEGFIFAIQDQVIKTKNYNKFIIKNENDDSCRICSSQPETIQHIISSCPVLTQTEYKKRHDDMAKIIHLELAFNSGLIEKKSPYFKYKPKPYLENNNYKLYWDRTILTDLNITANRPDIILISKIDKQAYLIDIAVPNSHNIHTTYTTKMSKYMLLAGEIKNLWNLPTIKILPMIMSATGIVPKTLNKNLKLLKLHSNLIIEIQKSILLNTCNIVRKFFNINNTTLTQQEQSCVAGDL

SEQ ID NO: 32714 - protein, 1069 aa, Cephalopholis sonnerati
MSAVCPCGKVCKNQRGLKIHQTKMKCLTGKQVVQRTGPVPGETQEEPGRESIHSAQTPHAPQAPPCVRHSEHRRVMWPAANKEREWLQFDNDPNQVLKATARGDADQKLRTMSAMIISIGAERFGIKEHQPTRGLGEPNRREVKISQLQQELRLLGRQFKQAREEEEAGLAELRHMLRKKLIILRRAEWHRRRGRERARKWAAFISNPFGFTKKILGQKRSGQLACTEEEVNEYLSATYSDSAREEELGPCRTLITPPEPTMAFNTKEPTLKEVEEVVKAARSSSAPGPSGVPYVVYKRCPGLLKRLWTYLKVIWRRGKVAQQWRHAEGVWIPKEENSSTIEQFRIISLLSVEGKIFFSIVARCMMEFLLRNRYIDTSVQKGGVPKVPGCIEHTGVVTQLIREAREGKGDLAVLWLDLANAYGSIPHKLVETSLDRHHIPGKIKDLILDYYSCFSLRVTSGTKTSAFHRLEKGIITGCTISVILFALAMNMLVKSAEVECRGPLTNSGMRQPPIRAFMDDLTVTTTSVSGCRWILQGLERLISWARMNFKPAKSRSLVVKVTDQFRFSLGGTQIPSVGEKPVKSLGKTYDCTLKDTAALQATSEELGTWLTAVDKSGLPGKFKAWIYQHGILPRLLWPLLVYNVPLTTVEGFERKVSCFLRRWLGLPRSLSSIALYGRNNKLKLPFSSLMEEFMVTRAREVLLYRDSSDIKVSLAGIEVRTGRKWKAHEAVDQAESRLRHSELVGTVASGRSGLGSNPRPHFNKAQGKERRQLIQEEVRAGVEEARCTRTVGMRQQGAWTRWEEAADRKISWTELWRSEPHRIKFLIRSVYDVLPSPSNLFRWGLADNPLCPLCQSAGSLEHILSSRPRALGDGRYRWRHDQVLRVIAEVISTGISTSKHQQPTKQSIAFVRAGEKPQQCRSQAGGLLATARDWQLKVDLGKQLKFPENIAVTTLRPDMVLVSETTRQVVLLELTVPWEDRMGEAFERKRAKYEELAGECRSRGWRTRCNPIEVGCRGFVGQSLIRALKMLGVKGQHNRRAIKNITDAAEKASRWLWIKRGDPWTTKAT

SEQ ID NO: 32715 - protein, 1151 aa, Trachurus trachurus
MTTMKSMVTAGETADNWKDSNRGSEGQQPELQLPQGRTHKQATENPTELYPQGCPRGGEDEHPNRTDKQVSTHANEKTTMSAVCSCGKVCKNRHGLKIHQAKMKCLTGKQVVQRTGLVPGETQEEQGRESTHSAQALHAPQAPSYVKHSEHRRVMWPAANKEREWLQFDEDLDQVLEATARGDADQKLRAMSALIISIGAERFGIKEQQQTRGLGEPNRREVKISQLRKELRLLGRQFKQAREEEKAGLAELRNILRKKLTTLRRAEWHRRRGRERARKRAAFISNPFGFTKKILGQKRSGHLACTEDEVNKYLSATYSDSAREEELGPCRTLITPPEPTSAFNTKEPTLKEVEEVVKAARTSSAPGPSGVPYVVYKRCPKLLKRLWTILKVIWRRGKVAQQWRHAEGVWIPKEENSSTMEQFRVISLLSVEGKIFFSIVARRMTEFLLNNNYIDTSVQKGGVPKVPGCIEHTGVVTQLIREARAGKGDLALLWLDLANAYGSIPHKLVETSLDRHHVPGKIKDLILNYYSCFNLRVTAGTSTSTFHRLEKGIITGCTISVILFALAMNMLVKSAEVECRGPLTNSGVRQPPIRAFMDDLTVTTTSVPGCRWILQGLERLINWARMDFKPAKSRSLVVKKGKVSDQFRFSLGGIQIPSVGEKPVKSLGKIYDGTLKDTGALQATSEELGTWLTAVDKSGLPGKFKAWIYQHGILPRLLWPLLVYDVPMTTTECLERKVSCFLRRWLGLPRSLSSIALYGRNNKLKLPFSSLTEEFMVTRAREVLLYRDSSDIKVSSAGIEVRTGRKWKAHEAVDQAESRLRHSELVGTVASGRAGLGSNPRPRYNKAQGKERRQLIQEAVRAGVEEARCSRTVGMRQQGAWTRWDGVAERNISWTELWRAEPHRIKFLVRSVYDVLPSPSNLFRWGLAETPLCPLCQKGGSLEHILSCCPRALGDGRYRWRHDQVLRVIAEVISTGISTSKHQQPAKQSITFVRAGEKPQQCRSQTGGLLATARDWQLEVDLGKQLKFPENIAVTTLRPDMVLVSATTRQVVLLELTVPWEDRMEEAFERKRAKYEELAGECRSRGWRTRCNPIEVGCRGFAGQSLIRALKMLGVKGLQIRKAIKNITDAAEKASRWLWIKRGDPWATHAT

SEQ ID NO: 32716 - protein, 1072 aa, Cephalopholis sonnerati
MSAVCPCGKVCKNQRGLKIHQTKMKCLTGKQVVQRTGPVPGETQEKPGRESIHSAQTLHAPQAPPCVRHSEHRRVMWPAANKEREWLQFDDDLNQVLKATARGDADQKLRTMSAMIISIGAERFGIKEHQPTRGLGEPNRREVKISQLRQELRLLGRQFKQAREEEEAGLAELRHMLRKKLIILRRAEWHRRRGRERARKRAAFISNPFGFTKKILGQKRSGQLACTEEEVNKYLSATYSDSAREEDLGPCRTLITPPEPTMAFNTKEPTLKEVEEVVKAARSSSAPGPSGVPYVVYKRCPGLLKRLWTYLKVIWRRGKVAQQWRHAEGVWIPKEENSSTIEQFRIISLLSVEGKIFFSIVARRMTEFLLRNRYIDTSVQKGGVPKVPGCIEHTGVVTQLIREAREGKGDLAVLWLDLANAYGSIPHKLVKTSLDRHHIPGKIKDLILDYYSCFSLRVTSGTKTSAFHRLEKGIITGCTISVILFALAMNMLVKSAEVECRGPLTNSGMRQPPIRAFMDDLTVTTTSVPGCRWILQGLERLISWARMNFKPAKSRSLVVKKGKVTDQFRFSLGGTQIPSVGEKPVKSLGKTYDCTLKDTAALQATSEELGTWLTAVDKSGLPGKFKAWIYQHGILPRLLWPLLVYNVPLTTVEGFERKVSCFLRRWLGLPRSLSSIALYGRNNKLKLPFSSLMEEFMVTRAREVLLYRESSDIKVSSAGIEVRTGRKWKAHEAVDQAESRLRHSELVGTVASGRSGLGSNPRPHFNKAQGKERRQLIQEEVRAGVEEARCTRTVGMRQQGAWTRWEEAADRKISWTELWRSEPHRIKFLIQSVYDVLPSPSNLFRWGLADNPLCPLCQSAGSLEHILSCCPRALGDGRYRWRHDQVLRVIAEVISTGISTSKHQQPTRQSIAFVRAGEKPQQCRSQAGGLLATARDWQLKVDLGRQLKFPENIAVTTLRPDMVLVSETTRQVVLLELTVPWEDRMEEAFERKRAKYEELAGECRSRGWRTRCNPIEVGCRGFVGQSLIRALKMLGVKGQHNRRAIKNITDAAEKASRWLWIKRGDPWTTKAT

SEQ ID NO: 32717 - protein, 1051 aa, Diplodus sargus
MFDEDAGGATRPVPGETQEEPGQESTHSAQSLHAPQAFSRFKHSEHRRVMWPAANKEGEWLQFDEDLDQVLNATARGDADQKLLSMSAMIVSIGAERFGIKEQQPTKCQGEPNRREVKISQLRQELRLLGRQFKVAREEEKAGLTELRSILRKKLTTLRRAEWHRRRGRERARRRAAFISNPFDFTKKILGQKKSGHFACTEDEVNKYLNATYSDSAREEDLGPCRTLITPPEPTFAFNTKEPTLKEVEEVVKAARSNSAPGPSGVPYVVYKRCPRLLKRLWTILRVIWRRGKVAQQWRHAEGVWIPKEESSTTIEQFRIISLLSAEGKIFFSIVARRTMEFLLRNTYIDTSVQKGGVPKVPGCIEHTGVVTQLIREARGGKGDLAVLWLDLANAYGSIPHKLVETSLDRHHVPGKIKDLILDYYSCFRLRVTSGTVTSAFHRLEKGIITGCTISVVLFSLSMNMLVKSAEVECRGPLTNSGMRQPPIRAFMDDLTVTTTSVPGCRWILQGLERLICWARMSFKPAKSRSLVVKKGKVSERFRFSVGDTQIPSVGEKPVKSLGKIYDCTLKDTAALQATSQELGTWLTAVDKSGLPGKFKAWLYQHGILPRLLWPLLVYDVPMTTVECFERKVSSFLRKWLGLPRSLSSIALYGRNNKLKLPFSSLTEEFMVTRAREVLLYRDSSDIKVSSAGIEVRTGRKWCAQEAVDQAESRLRHNELVGTVASGRAGLGSNPRPSYNKAQGKERRQLIQEEVRAGVEEARCSRTVGMRQQGAWTRWEEAADRKISWTELWRSEPHRIKFLVQSVYIVLPSPSNLHRWGLAENPLCPLCQRAGSLEHILSCCPRALGEGRYRWRHDQVLRVIAEAISTGISTSKHQQPARQSIAFVRAGEKPQQLRSQAGGLLATARDWQLKVDLGSQLKFPENIAVTTLRPDMVLVSETTRQVVLLELTVPWEERMEEAFERKRAKYEELAGECRSRGWRTRCNPIEVGCRGFAGQSLIRALKMLGVKGLHNRRAIKNISDAAEKASRWLWIKRGESWANALKTQAGT

SEQ ID NO: 32718 - protein, 1073 aa, Hirundichthys speculiger
MTQAHGQRITSAVCTCGKVCKNPRGLKIHQTKMACLRREQVKRRSGTAADATVPVAATAVPGQTEEEPGSESPHSTQNLQATQVPPPSRKSEHRRVKWPAANSKEWSKLDEDVDKTLEAFLRGNADLKLQTMCSLIMSMGAERFGVDQKQGASNPAKLNRREVKISQLRQELKSLRRQFKAAKEDERLALSELTNIIRKKLITLRRAERHRRKGKERARKRSAFIGNPFAFIKRLLGQKRSGHLACPVEEINHHLNITFSDTSRDQELGPCKALVTPPEPVSEFNNAEPTLAEVKEAVKAARSSLIPGPSGVPYRVYKQCPRILKRLWKILKVVWQRGKVAAQWRHAEGIWIPKEENSSNIEQFHIISLLSVESKIFFKIVSLRLTEFLLKNAYIDTSVQKGGVPGVPGCLEHTGVVTQLIREAKESKGDLATLWLDLTNFYGSIPHKLVKTALTRHHVPEKIVNLIMDYYNDFSARVSSGQVTSAWHRLEKGIITGCTISVSLFSLAMNMIVKSAEVECRGPKSRAGTRQPPIRAFMDDLTVMTTSVPGCRWLLQGLEQLISWAKMSFKPAKSRSLVLKKGKVADQFRFTVGGTKIPTVTEKPVKSLGKIFDSSLKDAAAVQQTKSDLSSWLTAIDKSGLPGKFKAWMYQHGVLPRILWPLLVYEVPMTTVEALEKTISQFLRRWLGLPRSLSSIALYGHSTKLHLPFSGLTEEFKVTHSREVMMYRDSADVKVSSAGILVKTGRKWQAQEAISRAEARLRHKILVGTVAIGRAGLGSFPKPRYDHARGKEKCQMVQEEIRAEVEEERCSKMVGMSKQGAWTRWEHVEPHKLTWAELWRAEPLRTKFLIQSVYDVLPSPANLHTWGLADTPECKLCQRRGTMEHILSCCPKALGEGQYCWRHDKVLKSLADSICTAIQNSKTQVAPKQSITFVRVGQKAKHQPNSSGGLLATARDWQLQVDLGRQLTFPANIATTSLRPDMVITSESTKQVVLLELTVPWEDRIDEANERKRAKYSELTTECRSNGWRARCKPVEIGCRGFAGHSLLERKWVSIDFNTVHIKSMETHLLFVF

SEQ ID NO: 32719 - protein, 959 aa, Pimephales promelas
MTTIIISLAAERFGLEEEKAVNLPYIMANRANKIHQLRQELKSQRRRFKEAREEERGPLVELRTILRKKLITLRRAEWHRKRRKERARKRAAFTANPFGFTKQLLGKKRSGQLTCSKAEIDRHLRDTFCDSSREQDMGHCQYMIDPPAPTVDFDGKEPSWKEIQEVIKKARASSAPGPSGVPYKVYKNCPKLQRRLWKILKVIWRRGKVAQQWRFAEGVWIPKEEESKTIDQFRSISLLSVEGKIFFSIVARWLTDFLLKNLYIDTSVQKGEIPKVPGCLEHTGVVTQLIREARENKGDLVVLWLDLTNAYGSIPHKLVEEALRRHYIPDRFRDLILDYYNNFSLRVSAGCTTSDWHRLEKGIITGCTISVILFALAMNMLVKAAEVQCRGPLTKSGVRQPPIRAFMDDLTVTTPHVPGARWILKGLEEITTWARMCFKPTKSRSLVLKKGKVSNKFRFTLGTTQVPSITEKPVKSLGKVFDCSLKDTAAICATNLELEGWLAAVDKSGLPGKFKAWIYQHGILPRILWPLLIYEVPISTVEGFERRVSRFLRKWLGLPRSLSSIALYGQNNKLKLPIRSLNEEFKVGHAREVLQYRESQDPKVCHAGIEVRTGRKWRAAEAANVAESWLRHRALVGAVTHGRAGLGSGTTSCYNKAQEKVRRSLVQQEVRAAVEEERASRMVGMQQQGAWTRWEHVVDQKVLWTALWKAEHHRIRFLIQAVYDVLPSPSNLFTWGLVESPACNLCLKRGTLEHVLSCCSKALGEGRYRWRHDQVLKTIASTISCGIGHCKRLRPVKNTIAFVRAGEKPPVAARATSSGLLATAQDWELKVDLERQLKFPETAATTTLRPDMLLISESSRQIVLLELTVPWEDRIEEANERKRAKYAELVEECRNNGWRARCEPIEVGCRGFAGQSLCRAYNILGIVGASKRRAIKEVTESAEVASRWLWMRRGEPWVG

SEQ ID NO: 32720 - protein, 1045 aa, Notolabrus celidotus
MECVCGKVCKNRHGLRIHQAKMKCVQKVLASQRTGTTPGETQEEPGPESPHSARSLQVMQEPDPRRVSEHRRVKWPQANKEKEWLQFDDDTDSILEATAKGQADRRLQTMTTIIISLAAERFGLEEKRAAKLPYTMNNRASKIHQLRQELKSLRRQYKEAREEERGPLAELRSIIRKKLTTLRRAEWHRRRRKERARKQAAFIANPFGVTKQLLGQKRSGQLTCSKAEIDCYLRDTFSDEFREKDLGHCKSLIDPPVPTLDFDGKEPGWKEVQEVVKKARASSAPGPSGVPYRVYKNCPKLLRRLWSILKVIWRRGKVAHQWRHAEGVWIPKEEESQNIDQFRTISLLSVEGKIFFSIVARRLTDYLLRNSYIDTSVQKGGIPKVPGCLEHTGVVTQLIREARENKGDLVVLWLDLANAYGSIPHKLVEEALNRHHIPGKFRDLILDYYNSFSLRVSSGSTTSEWHKLQEGIITGCTISVILFALAMNMLVKSAEVQCRGPLTKSGVRQPPIRAFMDDLTVTTTSVPGSRWILKGLEEVITWARMSFKPVKSRSLVLKKGKAISKFHFTLGSTQIPSITEKPVKSLGKVFDCSLRDTASIRATNQELEAWLTAVDKSGLPGKFKAWIYQHGILPRILWPLLVYDVPISTVEGFERRVSRFLRKWLGLPRSLSSIALYGQNNKLKLPFSSLNEEFMVSRTREVLQYRESCDPKVSQAGIEVRTGRKWKAAEAVDVAEARLRHRVLVGTVARGRAGLGSSKTPRYNKAQGKEKRSLIQEEVRAAVEDQRTSRMVGMRQQGAWTRWEQAVERKVSWTELWKAEPHRIKFLIQAVYDVLPSPSNLFSWGMVESPACPLCLKRGTLEHILSCCSKALGEGRYRWRHDQVLKAIADTICSGINHCKRLRPVKKTISFVRAGEKPKSAARTTSSGLLATAQDWELKVDLGKQLKFPETVARTSLRPDIVLISETSKQVILLELTVPWEDRIEEANERKRAKYTELVEQCRSNGWRARCEPIEVGCRGFVGQSLCRAYNMLGITGSSSPDSEG

SEQ ID NO: 32721 - protein, 1103 aa, Cyprinodon tularosa
MEKYPQGSPRGGEDEDPTRTDQRMTKPGNGNTTMTTECFCGKVCKNPRGLKIHQTKMRCVQTEQVSQRAGIPPGETQEELGLEPNHSAQNLQVVQAPNPHRPPEHRRVRWPRADREYEWRQFDEDTDSILGATAKGEVDRRLQTMTTIIISMGAERFGLEVKKAGRLPYTMSNRAHKIHQLRKELRVLRRQFKQAREEERGPLSELRNILRKKLLTLRRAEWHRRRRKERARKRTAFLANPFGFTKQLLGQKRNGQLTCSKAEVDHHLAATYGDASREQDLGDCQSLIDPPAPTVDFDGREPSWKEIQEVVKKARSSSAPGPSGVPYKVYKNCPKLLHRLWRILKVIWRRGKVAEQWRFAEGVWIPKEEGSTNIDQFRTIFLLSVEGKLFFSIVARRLTDYLLRNSYIDTSVQKGGIPKIPGCLEHNGVVTQLIREARESKGDLVVLWLDLANAYGSIPHKLVERTLCGHHVPAKFRDLILDYYNRFSLRVAAGSITSDWHKLEKGIITGCTISVILFALAMNMLAKSTEVQCRGPLTKSGVRQPPIRAFMDDLTVTTSNVPGSRWILKGLEELTTWARMTFKPAKSRSLVLKRGKVTNKFIFTLGGTQIPSITEKPVKSLGKVFNCSLRDTAAINATNQDLEAWLATVDKSGLPGKFKAWVYQHGILPRILWPLLVYEVPISTVEGFERRVSRFLRKWLGVPRSLSSIALYGKSNMLKLPFSSLNEEFKVSRTREVLQYRESCDPKVSQAGIEVRTGRKWRAAEAVEVAESRLRHRTLVGTVARGRAGLGSSTTPCCGKAKEKRRRTLLQEEVRAAVEEERSGRVLGMRQQGAWTRWEQAAERKVTWTELWRAEPQRIKFLIQAVYDVLPSPSNLFCWGKVESPACALCQKRGTLEHILSCCPRSLSEGRYRWRHDQVLKAIANSICSGIAHCKRLRPAKKAISFIRAGEGPPAVARVSSAGLLTMAQDWELMADLGKQLKFPGNVAITSLRPDVVLTSATSKQVVLLELTVPWEDRIEEANERKRAKYSDLVEQCRLNGWRARCEPIEVGCRGFAGQSLCRVYSMLGITGASKRRAIKEATEAAEVASRWLWIRRGDPWVG

SEQ ID NO: 32722 - protein, 1110 aa, Cyprinodon tularosa
MSHFRLNKGILGRPGGLCGKYCTCNRGFSVTSLASSRSAILGGILSYIKYIKNPRGLKIHQTKMRCVRTEQVSQRAGIPPGETQEELGLEPNHSAQNLQVVQAPNPHRPPEHRRVRWPRADREYEWRQFDEDTDSILEATAKGEVDRRLQTMTTIIISMGAERFGLEEKKSGRLPYTMSNRAHKIHQLRKELRVLRRQFKQAREEERGPLSELRNILRKKLLTLRRAEWHRRRRKERARKRTAFLANPFGFTKQLLGQKRSGQLTCSKAEVDHHLAATYGDASREQDLGDCQSLIDPPAPTVDFNGREPSWKEIQEVVKKARSSSAPGPSGVPYKVYKNCPKLLHRLWRILKVIWRRGKVAEQWRFAEGVWIPKEEGSTNIDQFRTIFLLSVEGKLFFSIVARRLTDYLLRNSYIDTSVQKGGIPKIPGCLEHNGVVTQLIREARESKGDLVVLWLDLANAYGSIPHKLVERTLCRHHVPAKFRDLILDYYNRFSLRVAAGSITSDWHKLEKGIITGCTISVILFALAMNMLAKSTEVQCRGPLTKSGVRQPPIRAFMDDLTVTTSNVPGSRWILKGLEELTTWARMTFKPAKSRSLVLKRGKVINKFIFTLGGTQIPSITEKPVKSLGKVFNCSLRDTAAINATSQDLEAWLATVDKSGLPGKFKAWVYQHGILPRILWPLLVIEVPISTVEGFERRVSRFLRKWLGVPRSLSSIALYGKNNMLKLPFSSLNEEFKVSRTREVLQYRESCDPKVSQAGIEVRTGRKWRAAEAVEVAESRLRHRTLVGTVARGRAGLGSSTTPCCGKAKEKRRRMLLQEEVRAAVEEERSGRVLGMRQQGAWTRWEQAAERKVTWTELWKAEPQRIKFLIQAVYDVLPSPSNLFCWGKVESPACALCQKRGTLEHILSCCPRSLSEGRYRWRHDQVLKAIANSICSGIAHCKRLRPAKKAISFIRAGEGPPAVARVSSSGLLAMAQDWELMADLGKQLKFPENVAITSLRPDVVLTSATSKQVVLLKLTVPWEDRIEEANERKRAKYSDLVEQCRLNGWRARCEPIEVGCRGFAGQSLCRVYSMLGITGASKRRAIKEATEAAEVASRWLWIRRGDPWVG

SEQ ID NO: 32723 - protein, 959 aa, Cyprinodon tularosa
MTTIIISMGAERFGLEEKKAGRLPYTMSNRAHKIHQLRKELRVLRRQFKQAREEERGPLSELRNILRKKLLTLRRAEWHRRRRKERARKRTAFLANPFGFTKQLLGQKRSGQLTCSKAEVNHHLAATYGDASREQDLGDCQSLIDPPAPTVDFDGREPSWKEIQEVVKKARSSSAPGPSGVPYKVYKNCPKLLHRLWRILKVIWRRGKVAEQWQFAEGVWIPKEEGSTNIDQFRTIFLLSVEGKLFFIIVARRLTDYLLRNSYIDTSVQKGGIPKIPGCLEHNGVVTQLIREARESKGDLVVLWLDLANAYGSIPHKLVERTLCRHHVPAKFRDLILDYYNRFSLRVAAGSITSDWHKLEKGIITGCTISVILFALAMNMLAKSTEVQCRGPLTKSGVRQPPIRAFMDDLTVTTSNVPGSRWILKGLEELITWARMTFKPAKSRSLVLKKGKVTNKFIFTLGGTQIPSITEKPVKSLGKVFNCSLRDTAAINATNQDLEAWLATVDKSGLPGKFKAWVYQHGILPRILWPLLVYEVPISTVEGFERRVSRFLRKWLGVPRSLSSIALYGKNNMLKLSFSSLNEEFKVSRTREVLQYRESCDPKVSQAGIEVRTGRKWRAAETVEVAESRLRHRTLVGTVAWGRAGLGSSTTPCCGKAKEKRRRTLLQEEVRAAVEEEQSGRVLGMRQQGAWTRWDQAAERKVTWTELWKAEPQRIKFLIQAVYDVLPSPSNLFCWGKVESPACALCQKRGTLEHILSCCPRSLSEGRYRWRHDQVLKAIANSICSGIAHCKRLRPAKKAISFIRAGEGPPAVARVSSSGLLAMAQDWELMADLGKQLKFPENVAITSLRPDVVLTSATSKQVVLLELTVPWEDRIEEANERKRAKYSDLVEQCRLNGWRARCEPIEVGCRGFAGQSLCRVYSMLGITGASKRRAIKEATEAAEVASRWLWIRRGDPWVG

SEQ ID NO: 32724 - protein, 1103 aa, Cyprinodon tularosa
MEKYPQGSPRGGEDEDPTRTDQRMTKPVNGNTTMTTECFCGKVCKNPSGLKIHQTKMRCVQTEQVSQRAGIPPGETQEELGLEPNHSAQNLQVVQAPNPHRPPEHRRVRWPRADREYEWRQFDEDTDSILEATAKGKVDRRLQTMTTIIISMGAERFGLEEKKSGRLPYTMSNRAHKIHQLRKELRVLRRQFKQAREEERGPLSVLRNILRKKLLTLRSAEWHRRRRKERARKRTAFLANPFEFTKQLLGQKRSGQLTCSKAEVDHHLAATYGDASREQDLGDCQSLIDPPAPTVDFNGMEPSWKEIQEVVKKARSSSAPGPSGVPYKVYKNCPKLLHRLWRILKVIWRRGKVAEQWRFAEGVWIPKEEGSTNIDQFRTIFLLSVEGKLFFSIVARRLTDYLLRNSYIDTSVQKGGIPKIPGCLEHNGVVTQLIREARESKGDLVVLWLDLANAYGSIPHKLVERTLCRHHVPAKFRDLILDYYNRFSLRVAAGSTTSDWHKLEKGIITGCTISVILFALAMNMLAKSTEVQCRGPLTKSGVRQPPIRAFMDDLTVTTSNVPGSRWILKGLEELTTWARMTFKPAKSRSLVLKRGKVINKFIFTLGGTQIPSITEKPMKSLGKVFNCSLRDTAAINATNQDLEAWLATVDKSGLPGKFKAWVYQHGILPRILWPLLVYEVPISTVEGFERRVSRFLRKWLGVPRSLSSIALYGKNNMLKLPFSSLNEEFKVSRTREVLQYRESCDPKVSQAGIEVRTGRKWRAAEAVEVAESRLRHRTLVGTVARGRAGLGSSTTPCCGKAKEKRRRMLLQEEVRAAVEEERSGRVLGMRQQGAWTRWEQAAERKVTWTELWKAEPQRIKFLIQAVYDVLPSPSNLFCWGKVESPACALCQKRGTLEHILSCCPRSLSEGRYRWRHDQVLKAIANSICSGIAHCKRLRPAKKAISFIRAGEGPPAVARVSSSGLLAMAQDWELMADLGKQLKFPENVAITSLRPDVVLTSATSKQVVLLELTVPWEDRIEEANERKRAKYSDLVEQCRLNGWRARCEPIEVGCRGFAGQSLCRVYSMLGITGASKRRAIKEATEAAEVASRWLWIRRGDPWVG

SEQ ID NO: 32725 - protein, 957 aa, Ctenopharyngodon idella
MTTIIISLAAERFGLEEKKVVNLPYTMNNRANKIHQLRQELKSLKRRFKEAREEERGPLAELRVILRKKLMVLRRAEWHRRRRKERARKRAAFIANPFGFTKQLLGKKRSGRLTCSKVEIDRHLRDTFCDRFREQDLGHCQHLIDPPAPTLDFDGKEPSWKEIQEVIKTARASSAPGPSGVPYKVYKNCPKLLHRLWKILKVIWRRGKVAQQWRFAEGVWIPKEEESKTIDQFRNISLLSVEGKIFFSIVARRLTDYLLRNSYIDTSVQKGGIPKVPGCLEHTGVVTQLIREARENKGDLVVLWLDLTNAYGSIPHKLVEEALCRHHIPDKFRDLILDYYDSFSLRVSAGSITSDWHRLEKGIITGCTISVILFALAMNMLVKSAEVQCKGPLTKSGIRQPPIRAFMDDLTVTTPHVPGGRWILKGLEEMITWACMCFKPAKSRSLVLKKGKVTNKFRFTLGTTQIPSITEKPVKSLGKVFDCSLRDTAAIHATNLELEGWLSVVDKSGLPGKFKAWIYQYGILPRILWPLLIYEVPISTIEGFERRVSRFLQKWLGLPRSLSSIALYGQNNKLKLPISSLNEEFKVGRAREVLQYRESQDPKVSQAGIEVRTGRKWRAAEAVDVAESRLRHRALIGAVTCGRAGLGSGTTSCYNKVQGKDRRSLVQQEVAVEEERASRMVGMWQQGAWTRWEHAVDRKISWAELWKADPHRIRFLIQAVYDVLPSPSNLFSWGLVESPACSLCLKRGTLEHILSCCPKALGEGRYRWRHDQVLKAIANTISCGIRHCKRLRPVKNTIAFVRAGEKPPLAARATSSGLLATARDWELKVDLGKQLKFPEAVATSTLRPDMLLISETSKQIVLLELTVPWEDRIEEANERKRAKYAELVEECRNNGWRARCEPIEVGCRGFAGQSLCRAYNILGIIGASKRKAIKEVTESAEVASRWLWIRRGEPWVG

SEQ ID NO: 32726 - protein, 1079 aa, Cyprinus carpio
MTTYGNENMTTTMECKCGKICKNQHGLRIHQAKRKCIQKEVESQRTGTTPGETQEEPGPESPHSARSLQVMQPPDAHRTSEHRRVKWPQASKEKEWRQFDEDADTILEATAKGRADRRLKTMTTIIISLAAERFGLEEKQAAKPPYTMNNRTSKIHQLRQELKTLRQQFKVAREEERGPLAELHSIIRKKLMTLRRAEGHRRRRKERSRRRAAFLANPFGFTKQLLGQKRSGQLTCSKAEVDHHLKQSYSDEYREQDLGPCRFLINPPAPALDFEGKEPGWKEIQEVVRRARASSAPGPSGVPYKVYKNCPRLLHRLWKILKVIWRRGSVADQWRQAEGVWIPKEEKSQKIDQFRTISLLSVEGKIFFSVISRRLTDYLLKNSYIDTSVQKGGTPEVPGCLEHTGVVTQLIRVTRENKGDLAVLWLDLANAYGSIPHKLVEETLNRHHTPKKFRDLILDYYANFYLRVSSGTTTSDWHKLEKGIITGCAISVILFALAMNMLVKSAEMQCRGLSKSGVRQPPIQAFMDDLTVTTTSVPGCRWILNGLQELMSWARMNFKPAKLRSLVLKKQKLTDKFHFSLGTTKIPSLTEKPVKSLGKVFNCSLRDAASTKATNQDLETWLAVVDKSGLPGKFKAWIYQHGILPRILWPLLVYEVPISTVEGFEMRISRFLHRWLGLPRSLSSIALYGQNNKLNLPMSSLSEEFMEMRSREVLQYRDSSDPKVAQAGIEVRTGRKWRAAVAVDDAESRLRQKVLVGSVAQGRAGLGSRRTPRYDKVEGKERRSLILEEVHAGVEEKRACQMAGMRQQGAWTRWQQTAERKVTWTELWKAEPYRIKFLIQAVYDMLPSPSNLFSWGKVETPACLLCQKRGTLEHILSCCPKALGEGRYRWRHDQVLKAVADSICSGISHSKSLRPVKTTAFVRAGEKSTPAKQGTPSSLLVTAHDWELSVDLGKQLKFPEAVAITTLRPDIVLTSEASKQVILLELTVPWEDRMEEANERKRAKYSQLVEGCRSNGWRAICQPVKVGCRGFVGQSLCRAYKMLGITGASQRRAIKLATDAAEVASRWLWIRRGEAWRVG

SEQ ID NO: 32727 - protein, 1188 aa, Cyprinodon tularosa
MCPGCTTRCITILIQHGRAIDFQERLDDNPESVVTSGETEDSSERRQLGQVGVASRTAAPAREHPNNATKNPKELYPQGCPRGGENEHPNWTDSMVTTLANGQLTTSAVCKCGKVCKNLKGLKIHQTKMRCLRNPVEQRTVPVPSTASGETEEDPGPESPHSAQSLHALPATPQSRASEHRQILWPAANKESEWLQFDKDVDSALEVTAKGDVDQRLKTMSTFIISIASDRFGIKEHRATKTTNVAIPNRREKKIAQLRQELRALRYQYRKASDEEKKALAELRIVVRERLLILRRAEWHRKRGKERARKRSSFIANPFGFAKKLLGEKCSGQLSCPKEDINRHLRNTYSDGMRDQDLGPCEALICPSEPSTLFDTRTPTFKEVKEVIKASRAASAPGPSGVPYKVFKHCPRLLERLWKIFRAIWKRGKVPQMWKHAEGVWIPKEENAKNIEQFRSISLLSVECKAFFKVISNRLMEFLLKNSYIDTSVQKWGVPGVPGCIEHTGVVTQLIREARESRGDLAVLWLDLANAYGSIPHKLVELSLSRYHVPEKVRHLILDYYEDFSLRVSSGASTSDWHRLEKGIITGCTISVSLFALAMNMLVKSAEVECRGPLSKSGTRQPPIRAFMDDLTVTTTSVPGCRWLLQGLDRLISWARMSFKPGKSRSLVLRKGKVTDRFRFSLGNTTIPSVSEKPVKSLGKLFNGDLKDTAARQATSTNLNQWLLAVDKSGLPGKFKAWIYQHNILPRLLWPLLMYEIPLTTVEGFERKISQYLRRWLGLPRSLSSIALFGHGTKLTLPLSSVSEEFKVARAREVLLYRDSTDGKVSSAGIEVRTGRKWRAKDAVERAEARLHHSTMVGTVATGRAGLGSNPKPCYNRVTGKDRRKLIQEEVRAEVEEARFSRVVGMSKQGAWTKWEHVSSRKITWTDVWRAEPHHFRFLVQAVYDVLPSPTNLFTWGLIESPACQLCQRKGSLEHILSCCPKALGDGRYRWRHDQVLRAIADTICTGINTSKSQPLSRSMIAFVRAGEKLQPSKKTQRGLLMTARDWQLLVDLGRQLRFPDYIAATTLRPDMVLSSTSTRQVVLLELTVPWEDRIEEAQERKRAKYTELVAECRRNGWKARCEPIEVGCRGFAGRSLHRVLGLLGICGLQRRRATKNILEAAEKASRWLWLRRGEAWRSALPGHKSGN

SEQ ID NO: 32728 - protein, 912 aa, Thalassophryne amazonica
MSTLIICIASDRFGIKEHRATKTTTAPIPNRHEKISQLRKELRILRSQFKKANDDEKEALAELRGVVREKLLTLRRAKRHRRQGKERARKRSAFIANPFGFAKKLLGEKRSGQLSCPKEDINSHISNTYSDSMRDQDLGHCEALVCPPEPSTLFDISAPTLNEVKEVIKASRVASAPGPSGVPYKVFKQCPCLLEVPQQWKYAEGVWVPKEENAKDIEQFKSISLLSAECKGFFKIVSNHLMRFLLKNSYIDTSVQKGGVPGVPGCIEHTGIVTQLICEARESRSDLAVLWLDLANAYGSIPHKLVELSLSKYHVPEKVRHLILDYYERFSLRVSSGASTSDWNRLEKGIITGCTISVSLFALAMNMLVKSAEVECRGPLSRSGTRQPPIRAFMDDLTVTTTSVPGCRWLLQGLDRLITWARMSFKPGKSRSLVLRKGKVTDRFRFSLGNTTILSVSKKPVKSLGKLFTGDLKDTAARQAAGDNLNQWLLAVDKSGLPGKFKAWIYQHNILPHLLWPLLMYEIPVTTVESFERKISQHLHRWLGLPRSLSSIALFGHGIKLQLPFSSVTEEFKVARAREVLLYRDSADGKVSSAGVEVLTGWKWRARDAVERAETRLRHSTLVGTVATGQAGLGNIPKPCFSRAKGKEKWKLIQEEVRAEVEEARFSRAVGMSEQGAWTKWKHVTSRKITWTELWKAEPHHFKFLVQSVYDVLPSPANVFTWGLTDSPVCQLCQKKGSLEHILSCCSKALGDGRYRWRHDQVLRTIADTICTGINISKGQQPTKSAIAFVRAGKKSQPSKKTQAGLLTTARDWQLLVDLGRQLRFLDNIAAMTLRSDMVLMSTSSRQVVLLELTVLWEDRMEEAQERKRAKYAELVAECWRNDWNARCEPIEVGCRGFAGRSLHRVLGLLGI

SEQ ID NO: 32729 - protein, 1188 aa, Cyprinodon tularosa
MCPGCTTRCITILIQHGRAIDFQERLDDNPESVVTSGETEDSSERRQLGQVGVASRTAAPAREHPNNATKNPKELYPQGCPRGGENEHPKRTDSMVTTFANGQLTTSAVCKCGKVCKNLKGLKIHQTKMRCLRNPVEQRTVPVPSTASGETEEDPGPESPHSAQSLHALPATPQSRASEHRQILWPAANKESEWLQFDKDVDSALEVTAKGDVDQRLKTMSTFIISIASDRFGIKEHRATKTTNVAIPNRREKKIAQLRQELRALRYQYRKASDEEKKALAELRIVVRERLLTLRRAEWHRKRGKERARKRSSFIANPFGFAKKLLGEKCSGQLSCPKEDINRHLRSTYSDGMRDQDLGPCEALICPSEPSTLFDTRTPTFKEVKEVLKASRAASAPGPSGVPYKVFKHCPRLLERLWKIFRAIWKRGKVPQMWKHAEGVWIPKEENAKNIEQFRSISLLSVECKAFFKVISNRLMEFLLKNSYIDTSVQKGGVPGVPGCIEHTGVVTQLIREARESRGDLAVLWLDLANAYGSIPHKLVELSLSRYHVPEKVRHLILDYYEDFSLRVSSGASTSDWHRLEKGIITGCTISVSLFALAMNMLVKSAEVECRGPLSKSGTRQPPIRAFMDDLTVTTTSVPGCRWLLQGLDRLISWARMSFKPGKSRSLVVRKGKVTDRFRFILGNTTIPSVSEKPVKSLGKLFTGDLKDTAARQATSTNLNQWLLAVDKSGLPGKFKAWIYQHNILPRLLWPLLMYEIPLTTVEGFERKISQYLRRWLGLPRSLSSIALFGHGTKLTLPLSSVSEEFKVARAREVLLYRDSTDGKVSSAGIEVRTGRKWRAKVAVERAEARLRHSTMVGTVATGRAGLGSNPKPCYNRVTGKDRRKLIQEEVRAEVEEARFSRVVGMSKQGAWTKWEHVSSRKITWTDVWRAEPHHFRFLVQAVYDVLPSPTNLFTWGLIESPACQLCQRKGSLEHILSCCPKALGDGRYRWRHDQVLRAIADTIFTGINTSKSQPLSRSMIAFVRAGEKLQPSKKTQGGLLTTARDWQLLVDLGRQLRFPDYIAATTLRPDMVLSSNSTRQVVLLELTVPWEDRIEEAQERKRAKYTELVAECRRNGWKARCEPIEVGCRGFAGRSLHRVLGLLGICGLQRRRATKNILEAAEKASRWLWLRRGEAWRSALPGHKSGN

SEQ ID NO: 32730 - protein, 1058 aa, Thalassophryne amazonica
MRCLRNPVVQRSVLVPSTASGETEEDPGPETPHSAQSLRALLASPQSRPSEQRRILWPSANKESEWQRFDVDVDSALEPTAKGDVEQRLRTMSTLIICITSDRFGVKEHRATKTTTAPIPNRREKISQLRKELRILRSQFKKANDDEKEALAELRGVVREKLLTLRRAEGHRRRGKERARKRSAFIANPFGFTKKLLGEKRSGQLSGPKEDINRHISHTYSDSMRDQDLGHCEALVCLPEPSTLFDISAPTLKGVKEVIKASRAASALGPSGVPYKVFKQSPRLLERLWKIFRVIWKRGKVPQQWKYAEGVWVPKEENAKDIEQFRSISLLSAECKAFFKIVSNCLMRFLLKNSYIDTSVQKGGVPGAPGCIEHTGVVTQLIREARESRGDLAVLWLNLTIAYGSIPHKLVELSLRKYHVPEKVHHLILDYYDHFSLRVSSGGSTSDWHRLEKGIITGCTISVFLFALAMNMLVKSAEVECRGPLAKSGTRQPPIRALMDDLTVTTTSVPGCRWLLQGLDRLITWARMSFKPGKSRSLVLRKGKVTDCFRFSLGNTTIPSVSEKPVKSLGKLFTGDLKDTAARQAAGDNLNQWLLAVDKSGIPGKFKAWIYQHNILPRLLWPLLMYEISVTTVEGFERKISQHLRRWLGLPRSLSSIALFGHRIKLQLPFSSVTQEFKVARAREVLLYRDSADGKVSSAGVEVRTGRKWHARDAVERAEARLWHSTLVGTVATGRAGLDSIPKPCFSRAKGKERRKLIQEEVRAEVEEACFSRAVGMSKQGAWTKWEHVTSWKITWTELWKAEPHHFKFLIQSVYDVHPSPANLFTWGLTDSPVCHLCQKKGSLEHILSCCSKALGDGRYCWRHDQVLRAIADTIYTGINISKGQQPTKSAIAFVRAGEKSQPSKKTQGGLLTTARDWQLLVDLGRQLRFLDNIAATTLRPDMVLSTSSRQVVLLELTVPWEDRMEEAQERKRAKYAELVAECWRNGWNACCEPIEVGCRGFAGRSLHRVLGLLGICGLHRQRATKNILEAAEKPSRWLWLRRGEAWRSALPGHKSGD

SEQ ID NO: 32731 - protein, 1094 aa, Cyprinodon brontotheroides
MVTTLANGQLTTSAVCKCGMVCKNLKGLKIHQTKMRCLRNPVEQRTVPVPSTASGETEEDPGPESPHSAQSLHALPATPQSRASEHRQILWPAANKESEWLQFDKDVDSALEVTAKGDVDQRLKTMSTFIISIASDRFGIKEHRATKTTNVAIPNRREKKIAQLRQELRALRYQYRKASDEEKKALAELRIVVRERLLTLRRAEWHRKRGKERARKRSSFIANPFGFAKKLLGEKCSGQLSCPKEDINRHLRNTYSDGMRDQDLGPCEALICPSEPSTLFDTRTPTFKEVKEVIKASRAASAPGPSGVPYKVFKHCPRLLERLWKIFRAIWKRGKVPQMWKHAEGVWIPKEENAKNIEQFRSISLLSVECKAFFKVISNRLMEFLLKNSYIDTSVQKGGVPGVPGCIEHTGVVTQLIREARESRGDLAVLWLDLANAYGSIPHKLVELSLSRYHVPEKVRHLILDYYEDFSLRVSSGASTSDWHRLEKGIITGCTISVSLFALAMNMSVKSAEVECRGPLSKSGTRQPPIRAFMDDLTVTTTSVPGCRWLLQGLDRLISWARMSFKPGKSRSLVLRKGKVTDRFRFSLGNTTIPSVSEKPVKSLGKLFTGDLKDTSARQATSTNLNQWLLAVDKSGLPGKFKAWIYQHNILPRLLWPLLMYEIPLTTVEGFERKISQYLRRWLGLPRSLSSIALFGHWTKLTLPLSSVSEEFKVARAREVLLYRDSTDGKVSSAGIEVRTGRKWRAKDAVERAEARLRHSTMVGTVATGRAGLGSNPKPCYSRVTGKDRRKLIQEEVRAEVEEARFSRVVGMSKQGAWTKWEHVSSRKITWTDVWRAEPHHFRFLVQAVYDVLPSPTNLFTWGLIESPACQLCQRKGSLEHILSCCPKALGDGRYRWRHDQVLRAIADTICTGINTSKSQPLSRSMIAFVRAGEKLQPSKKTQGGLLTTARDWQLLVDLGRQLRFPDYIAATTLRPDMVLSSTSTRQVVLLELTVPWEDRIEEAQERKRAKYTELVAECRRNGWKARCEPIEVGCRGFAGRSLHRVLGLLGICGLQRRRATKNILEAAEKASRWLWLRRGEAWRSALPGHKSGN

SEQ ID NO: 32732 - protein, 1101 aa, Labeo catla
MSNGLTTMRVTCMCGKSCKNLKGLKIHQTKMGCMRREQAEQRTEAVQSTAPGETEEEQDPESTHSVQNLQAQRAPPNNPSEHRRVLWPAAHKETEWRQFDEDVDGALEASSKGSVDQQLQTMCTFIICIGAERFGIKQPKAKTIARPNRRENKITALRRDLKSLKQRFKKASEEEKPALAELRDIFRKKLISLRRAEWHRRKGRERARKRTAFVANPFGFTKKLLGQKRSGTLMCTEDDINRHLSETYSDRLREEDLGPCRELISPPLPSSQFNTKEPTLAEVKNTVRAARTSAAPGPSGVPYKVYKHCPRLLQRLWRIIRVVWRRGRVAKQWRYAEGVWIPKEENASDISQFRTISLLSVEGKIFFKILANRMTDFLLRNSYIDTSVQKGGVPGFPGCIEHTGVVTQLIREARENRGDLSVIWLDLANAYGSIPHKLVTKALTMHHVPQKITELIQDYYSSFSMRFTSGSITSAWHHLEKGIITGCTISVSLFALAMTMLVKAAEAECRGPLSRSGTRQPPIRAFMDDLTVTTTSVPGPGCRWLLKGLERLTSWARMTFKPAKCRSLVLRKGRVEDKFRFYMNGLQIPSLTEKPVKSLGKLFDVTLRDTVAIQAMHAELKTWLAAVDRSGLPGKFKAWIYQHGILPRLLWPLLMYQVPITTVETLERNISQFLRRWLGLPKSLSCIALYGHTNKLQLPFSGLTEEFKVSRAREVLLYRDSLDTRVSSAGIEVRTGRKWRAQEAVQLAEARLRHGVLVGSVAVGRAGLGCHKTPRYDRAQGRDRRQMVQGEVRAEVEEERRSKTVAMRQQGAWTNWEHALTRKITWSELWRSEPARLKFLIQSVYDVLPSPANLHCWGLAEAPSCPLCPARGSLEHILSCCPKALGEGRYRWRHDQVLKAVADTICAGIQQIKHQPSARPYIVFVRAGEKPQSQPKVPADLLSTAGDWQLKVDLGRQLKFPDHITSTTLRPDMVLTSESTKQVVLLELTVPWEDRIEEAFERKKAKYLDLVEDCRRKGWRARCEPIEVGCRGFPGQSLHRSLRLLGIRGAQERKATRNICEAAEKASRWLWIKRGDVWLSALLGHKSGSDHPRLGRPGEGV

SEQ ID NO: 32733 - protein, 1095 aa, Pimephales promelas
MASPLTSRKRLDDDFESVVTAGETADSAERRQQGQGRLAPQTAAPEREHPNHATENPKEKYPQGGPRGGENERPKRTVFLATTNANGQSTMSAVCKCGKVCKNATGLKIHQTKMGCLRKLVTQRTVPVPSTAPGETEEEPGPDTYHSAQSLQAPQATPQSRPSERRRFLWPAASKESVWRQFDEDVNAALEVTAKGGVDQRLQTMSTFIISIASERFGAKEQRATKTSTAAPIPNRREVKISQHRQELRTLRRQYRKASEEEKVALAELRGVVRKRLITLRRAEWHRKRGKERARRRSAFIADPFGFTRKLLGEKRSGRLSCPEEDINRYIRNTYSDGMREHDLGHCGALICPPEPSTPFNINEPTLKEVKEVIKAARTSSAPGPSGVPYKVFKHCPRLLERLWKILRTIWRRGKVPQQWRYAEGVWIPKEENASNIEQFRTISLLSVECKTFFKIVSNRLMGFLLKNTYIDTSVQKGGIPGVPGCIEHTGVVTQLIREAREGKGDLAVLWLDLANAYGSIPHRLVELALSRYHVPEKIQNLILDYYNNFSLRVSSGTLISEWQRLEKGIITGCTISVSLFALAMNMLVKSAEVECRGPLSRTGTRQPPIRAFMEDLTVTTTTVPGCRWLLRGLEQLITWARMSFKPAKSRSLVLRKGKVADQFRFMLGDTRIPSVSEKPVKSLGKLFTHNLKDTAARKGTSDDFDTWLLAVDKSGLPGRFKAWIYQHGILPRLLWPLRIYEVPITTVEGFERKVSRFLRRWLGLPRSLSSIAFFGHNTKLQLPLSSLAEEFKVTRAREVLLYRDSVDTKVSSAGVEVRTGRKWRAQDAVERAEARLRHSTLVGTVATGRAGFGSNPKPCYSKARGKEKRKLIQEEVRAEVEEARFSRVVGMSKQGAWTKWEQTAGRKITWAELWKAEPHHFKFLVQSVYDVLPSPANLFTWGLVDSPACQLCQKRGSLEHILSCCPKALGDGRYRWRHDQILKAVADAICIGINISKQHHPTKSAIAFVRAGEKPQPPRKTQGGVLATARDWHLLVDLGTQLRFPDTIAVTTLRPDMVLMSAASKQVVLLELTVLGKREWRKPRKERGPSTLIW

SEQ ID NO: 32734 - protein, 1070 aa, Umbra pygmaea
MGCLRELVIQRTVPVPSTTPGETEEDPGPDTNHSAQSLHAPQATPQSRPSERRRFLWPATNKELMWRQFDEDVHAALEATAKGGVGQRLRTMSTFIMSIASDRFGTKEQRTTKTSAVAPIPNLREFKITQLRQELRTLRSQYRKASEEERVDLAQLRGVVRERLITLRRAEWHRTRGKERARRRSAFIANPFGFTRKLLGEKRSGQLSCPEEDINRYIRNTYSDGRREQDLGHCAALICPPEPSTLFNIDEPTLRDVKEVIKFARTSSAPGPSGVPYKVFKHCPRLLERLWKILRTIWRRGRVPQQWRYAEGVWIPKEENASNIEQFRTISLLSVESKTFFKIVSNRLMGFLLKNTYIDTSVQKGGVPGCIEHTGVVTQLIREARECRGDLAVLWLDLANAYGSIPHKLVELALSRYHVPEKIRNLILDYYNNFSLRVSSGTSTSEWHRLEKGIITGCTISVSLFALAMIMLVKSAEVECRGPLSRSGTRQPPIRAFMDDLTVTTTRVPGYKWLLQGLEKLITWARMSFKPVKSRSLVLRKGKVADKFRFMLGDTRIPSVSEKPVKSLGKLFTGNLKDTVARQGTSDDLDTWLSAVDKSRLPGKFKAWIYQHGILPRLLWPLLIYEVPITTVEGFERKVSRFLRRWLGLPRSLSSIAFFGHNTKLQLPFSSLAEEFKVTRAREVLLYRDSVGTKVSSAGVEVRTGRKWRAQDAVERAEARLRHSTLVGTVATGRTGLGSNPRPCFSKARGKEKRRLIQEEVRAEVEEDRFSRVVGMSKQGAWTRWEHTAGRKITWADLWRAEPNQFRFLVQSVYDVLPSPANLFTWGLVDSPACKLCQKRGSIEHILSCCSKALGDCRYRWFHDQVLKAVADTICTGINISKQHHPSKSVIAFVRAGKKPQPPRKTQGGLLATARDWHLLVDLGRQLRFPDTFAVTALRPDMVLMSVASRQVVLLELTVPWEDQIEEAQERKRAKYADLVAECRRNGWKARCEPIEVGCRGFAGQSLHRVMGLLGICGLHRQRAIKNILEAAEKASRWLWLRRGDAWRSALPGHKSGPDHPRLGRPGEGV

SEQ ID NO: 32735 - protein, 905 aa, Larimichthys crocea
MHEVFAMWTWGLMYKYLRGFPTETWRTPKPRNSCAQKNSDVSKCDILRKKLISLRCTEWHKRKGRERARKRTAFIANPFGFTRRLLGQKRSGTLMCPEDDINRHLSETYNDRHREEDLGPCKELIIPPLPTSQFNTKEPTLAEVRNTVRAARTSAAPGSSGVPYKVYKHCLRLLQRLWRIIRVVWRRGRVAKQWRHAKGVWIPKEENASDISQFQTISLLSVEGKIFFKILANRMTDFLLKNSYIDTSVQKGGVPGMPGCVEHTGVVTQLIREARENRGDLSVIWLDLANAYRSVPHKLVTKALTTHHVPQKITDLIQDYYNSFSMRFTSGSITSAWHRLEKGIVIGCTISVTLFDLAMTMLVKAAEVECRGPLSRSGIRQPPISTFMDDLTVTATSVPGCRWLLKGLERLTSWVEMTFKPAKCRSLVLRKGKVEDKFRFHMNGLQIPTLTEKPVKSLGKIFNATLRDTAAIKAMHTELKTWLAAVDRSGLPGKFKAWIYQHGILQRLLWPLMMYYVPITTVEALERNINQFLRRWLGLPKSLSCITLYGPTNKLQLPFSGLTEEFKVARAREVLLYRDSSNTRVSSAGIEVRTGRKWRAQEAVQLAEARLRHGVLVGSVAVGRAGLGCHKTPRYDRAQGRDGRQMIQGEVRSSKTVAMRQQGAWTNWDHALTRNITWSELWRSEPARLKFLIQLVYDVLRSSSNLHCWGLEETPSCPLCPAKGSLEHILSCCPKALGEGRYRWRHDQVLKAVADTICAGIQQSKHQPPARPNIAFVRAGEKPQSQLKVPAGLLSTAGDWQLKVDLGRQLKFPEHITSTTLRPDMVLTSESSKQVVLLELTVPWEDRIEAAYERKKAKYLDLVEDCRLNRWRARCEPIEVGCREFPGQSLHRILRLLGIRGVQEW

SEQ ID NO: 32736 - protein, 1099 aa, Labeo rohita
MSNGLTTMRVTCMCGKSCKNLKGLKIHQTKMGCMRREQAEQRTEAVQSTAPGETEEEQDPESTHSVQNLQAQRAPPNNPSEHRRVLWPAAHKETEWRQFDEDVDGALEASSKGSVDQQLQTMCTFIICIGAERFGIKQPKAKTIARPNRRENKITALRRDLKSLKQRFKKASEEEKPALAELRDIFRKKLISLRRAEWHRRKGRERARKRTAFVANPFGFTKKLLGQKRSGTLMCTEDDINRHLSETYSDRLREEDLGPCRELISPPLPSSQFNTKEPTLAEVKNTVRAARTSAAPGPSGVPYKVYKHCPRLLQRLWRIIRVVWRRGRVAKQWRYAEGVWIPKEENASDISQFRTISLLSVEGKIFFKILANRMTDFLLRNSYIDTSVQKGGVPGFPGCIEHTGVVTQLIREARENRGDLSVIWLDLANAYGSIPHKLVTKALTMHHVPQKITELIQDYYSSFSMRFTSGSITSAWHHLEKGIITGCTISVSLFALAMTMLVKAAEAECRGPLSRSGTRQPPIRAFMDDLTVTTTSVPGCRWLLKGLERLTSWARMTFKPAKCRSLVLRKGRVEDKFRFYMNGLQIPSLTEKPVKSLGKLFDVTLRDTVAIQAMHAELKTWLAAVDRSGLPGKFKAWIYQHGILPRLLWPLLMYQVPITTVETLERNISQFLRRWLGLPKSLSCIALYGHTNKLQLPFSGLTEEFKVTRAREVLLYRDSLDTRVSSAGIEVRTGRKWRAQEAVQLAEARLRHGVLVGSVAVGRAGLGCHKTPRYDRAQGRDRRQMVQGEVRAEVEEERRSKTVAMRQQGAWTNWEHALTRKITWSELWRAEPARLKFLIQSVYDVLPSPANLHCWGLAEAPSCPLCPARGSLEHILSCCPKALGEGRYRWRHDQVLKAVADTICAGIQQIKHQPPARPYIVFVRAGEKPQSQPKVPADLLSTAGDWQLKVDLGRQLKFPDHITSTTLRPDMVLTSESTKQVVLLELTVPWEDRIEEAFERKKAKYLDLVEDCRRKGWRARCEPIEVGCRGFPGQSLHRSLRLLGIRGAQERKATRNICEAAEKASRWLWIKRGDVWLSALLGHKSGSDHPRLGRPGEGV

SEQ ID NO: 32737 - protein, 1056 aa, Cyprinus carpio
MDFTVPDIRNGFSTTTATCFCGKICKNLRGLRIHQAKMGCTRRKQVEQRTEPVLSTDPGETEKEQEPESPHSVQNLHALHATPSKPSEHRRVLWPAANKEAEWQQFDEDIEATLDASCRGEVDQRLQLMSTLINSIGAERFGIKVPKAQIIARPNRRETKISQLRKELKVLHRQYKRASEEEKPALTELRDILRQKLISLRRAERHRRRGRERARKRMAFIANPFSFTKQLLGQKRSGTLRCPKEEINQYLSDKYSDSRREENLPTCRELPTPPEPSFQFNIKEPTLAEVRDIVQTARTSAAPGPSGVPYKVYKYCPRLLKRLWRLIRVVWRRGKVAQQWRHAEGVWIPKEENASDITQFRTISLLSVEGKIFFKILVNGLSEFLMRNSYIDTSVQKGGVPGMPGCLEHTGVITQLIREARENRGDLAVLWLDLADAYGSIPHKLVTTALTIHHIPEKIIELIRDYYSSFSLRFTSGTVTSAGHRLEKGIITGCTISVVLFALAMSMLVKAAEVECRGPLSRSGIRQPPIRAYMDDLTVTSTSVTGCRWLLRGLERIMAWPRMMFKPAKSRSLVLRKGRVEDKHRFYVDGITIPTVSEKPVKSLGKIFDSTLKDKAAVEAAHMEPKTWLSAVDKSGLPGKFKAWIYQHGILPRLLWPLLIYEVPVSLVEGFERNISQYLHRWLGLPKSLSSIALYGHNNKLQLPFTGLTEEFKVTRAREVLLYRDSADTRVSSAGITVRTGRKWQADKAVDQAEARLRHSVLVGSVAVGRAGLGSHTRPRYDKAQGRERRQMVQGEIRAEVEEERLSRTVAISQQGAWANWNHAAARKITWTELWKSEPVRLKFLIQSVYDVLPSPSNLYTWGLAETPTCPLCPAHGSLEHILSCCPKALGEGRYTWRHNQVLKVVADTICTAIRESKHQVPARHNISFVRAGEKPQGERKASTGLLATARDWKLQEDLGRQLKFPEHIARTSLRPDLVLTSDSTKQIVLVELTVPWEDRMEEAFERKKAKYLELVEACRGSGWRARCEPIEVGCRGFQSQSVYRAFRLLGIRGLR

SEQ ID NO: 32738 - protein, 1121 aa, Megalobrama amblycephala
MVPDIRNGFLTTTATCFCGKICKNLRGLRIHQAKMGCTRRKQVEQRTEPVLSTDPGETEEEQEPESPHSVQNLHARHATPSKPSEHCRVLWPAANKEAEWRQFDEDVEATLDASCRGEVDQRLQLMSTLIISIGAERFGIKVPKAQNIARPNRREAKISQLRKELKVLNRQYKRASEEEKPALTELRDILRQKLISLRRAERHRRRGRERARKRMAFIANPFGFTKQLLGQKRSGTLRCPKEEINQHLSDKYSDSRREENLPSCRELPTPPEPSFQFNIKEPTLAEVRDIVRTARTSAAPGPSGVPYKVYKHCLRLLERLWRLIRVVWRRGKVAQQWRHAEGVWIPKEENASDITQFRTISLLSVEGKIFFKILANRLSEYLMRNSYIDTSVQKGGVPGMPGCLEHTGVITQLIREARENRGDLAVLWLDLADAYGSIPHKLVTTALTIHHIPEKITELIRDYYSSFSLRFTSGTVTSAGHRLEKGIITGCTISVVLFALAMSMLVKAAEVECRGPLSRSGIRQPPIRAYMDDLTVTSTSVTGCRWLLRGLERIMAWARMMFKPAKSRSLVLRKGRVEDKHRFYVDGVTIPTVSEKPVKSLGKIFDSTLKDKAAVEAAHMELKTWLSAVDKSGLPGKFKAWIYQHGILPRLLWPLLIYEVPVSLVEGFECNISQYLRRWLGLPKSLSSIALYGHNNKLQLPFTGLTEEFKVTRAREVLLYRDSADTRVSSAGITVRTGRKWRAQEAVDQAEARLRHSVLVGSVVVGRAGLGSHTRPRYDKAQGRERRKMVQRVEEERLSRTVAMRQQGAWANWNHAAARKITWTELWKSEPARLKFLIQSVYDVFPSPSNLYTWGLVETSTCPLCPAHGSLEHILSCCPKALGEGRYTWRHNQVLKAVADTICTAFRESKHQVPARYNISFVRAGEKPQGERKASTGLLATARDWKLHVDLGRQLKFPEHIARTSLRPDLVLTSDSTKQVVLVELTVPWEDRMEEAFERKKAKYLELVEACRGSGWRVRCEPIEVGCRGFLSQSVYRAFRLLGIRGLRERRATKNISEAAEKASRWLWIKRGEVWSSSLLGYKPGPDQPRLGRPGEGVCDQRPETPYDPGSFTEDVSKLHL

SEQ ID NO: 32739 - protein, 978 aa, Cyprinodon tularosa
MSTLIISISAERFGIKLPKTQNFARPNRHETKISQLRKELKALNRQYKKAGEEERPALRELRGILRQRLISLRRAEWHRRRGRERARKRTAFVANPFGFTKRLLGQTRSGTLQCSENEINQSLSATYSDSRREEELPTCRELPTPPIPSVQFNIKEPTLAEVRNIVRAARTSAAPGPSGVPYKVYKHCPRLLERLWRLIRVVWRRGKVAQQWRHSEGVWIPKEENASDITQFRTISLLSVEGKIFFKILANRLSEYLLRNSYIDTSVQKGGVQGMPGCLEHTGVITQLIREARENRGDLAVLWLDLANAYGSIPHKLVSKALTTYHVPEKITELIRDYYSGFSLRFTTGTTTSAWHRLEKGIITGCTMSVVLFALSMNMLVKAAEVECRGPLSRSGIRQPPIRAYMDDLTVTSTSVTGCRWLLRGLERIMAWARMIFKPAKSRSLVLRKGKVEDKYRFCVDGVPIPTVSEKPVKSLGKIFDSTLKDKAAVEAAQLKLKALLAAVDKSGLPGKFKAWIYQHGILPRLLWPLLIYEVPVTMVEGFERNVSQYLRRWLGLPKSLSTIALYGHSNKLQLPLTGVTEEFKVTRAREVLLYRDSADTRVSSASITVRTGRKWRAQQAVNQAEARLRHSVIVGSVAVGRAGLGSLTKLRYDQARGQVRRQMIQGEICAEVEEERQSRMVAMRQQGAWTNWNHACARKITWTELWQYEPARLKFLIQSVYDVLPSPSNLYTWGLAEAPTCPLCPAHGSLEHILRCCPKALGEGRYTWRHNQVLKAVADTICTGILESKHQSPLRHNTFFVRAGEKPERAGRGTSGLLAVARDWQLHVDIGRQLKFPEHIVRTLLRPDLVLTSDSTKQVVLLELTVPWEDRMEEAHERKRAKYLELIEACRCRGWRARCEPIEVGCRGFLSQTVHRAFRLLGIRGLLERRATRNISEAAEKASRWLWIKRGDAWSSALLEHKLGPDQPWLGRPDEGV

SEQ ID NO: 32740 - protein, 978 aa, Cyprinodon tularosa
MSTLIISIGAERFGIKLPKAQNFARPNRRETKISQFRKELKALNRQYKKAGEEERPALRELRGILRQKLISLRRAEWHRRRGRERARKRKAFVANPFGFTKRLLGQTRSGTLQCSENEINQSLSATYSDSRREEELPTCRELPTPPIPSVQFNIKEPTLAEVRNIVRAARTSAAPGPSGVPYKVYKHCPRLVERLWRLIRVVWRRGKVAQQWRHSEVVWIPKEENASDITQFRTISLLSVEGKIFFKILANRLSEYLLRNSYIDTSVQKGGVQGMPGCLEHTGVITQLIREARENRGDLAVLWLDLANAYGSIPHKLVSKALTTYQVPEKITELIWDYYSGFSLRFTTGTITSAWHRLEKGIITGCTMSVVLFALSMNMLVKAAEVECRGPLSRSGIRQPPIRAYMDDLTVTSTSVTGCRWLLRGLERIMAWARMIFKPAKSRSLVLRKGKVEDKYRFCVDGVPIPTVSEKPVKSLGKIFDSTLKDKAAVEAAQVKLKAWLAAVDKSGLPGKFKAWIYQHGILPRLLWPLLIYEVPVTMVEGFERNVSQYLRRWLGLPKSLSSIALYGHSNKLQLPLTGVTEEFKVTRAREVLLYRDSADTRVSSAGITVRTGRKWRAQQAVNQAEARLRHSVIVGSVAVGRAGLGSLTKLRYDQARGQERRQMIQGEIRAEVEEERQSRMVAMCQQGAWTNWNHASARKITWTELWKYEPARLKFLIQSVYDVLPSPSNLYTWGLAEAPTCPLCPAHGSLEHILSCCPKALGEGRYTWRHNQVLKEVADTICTGILESKHQSPLRHNTFFVRAGEKPERAGRGTSGLLAVAWDWQLHVDIGRQLKFPEHIVRTLLRPDLVLTSDSTKQVVLLELTVPWEDRMEEAHERKKAKYLELIEACRCRGWRARCEPIEVGCRGFLSQTVHRAFRLLGIRGLLERRATRNISEAAEKASRWLWIKRGDAWSSALLEHKLGPDQPRLGRPDEGV

SEQ ID NO: 32741 - protein, 1094 aa, Danio albolineatus
MSNGLTTTRVTCMCGKSCKNLKGLKIHQTKMGCMRREQAEQRTEALQSMASGETEEEQDLESTHSVQNLEARRAPPNNPSEHRRVLWPAAHKETEWRQFDEDVDGALEASSKGSVDQQLQTMCTFIICIGAERFGIKQSKAKTIAKPNRRENKITALRRDLKSLKQRFKKASEEEKPALAELRDILRKKLISLRRAERHRRRGRERARKRTAFIANPFGFTKKLLGQKRSGTLMCPEEDINRHLSETYSDRQREEDLGPCRELISPPLPSSQFNINEPTLAEVKNTIRAAQTGAAPGPSGVPYKVYKHCPRLLQRLWRIIRVVWRRGRVAKQWRYAEGVWIPKEENASDISQFRTISLLSVEGKIFFKILANRMTDFLLRNSYIDTSVQKGGVPGFPGCIEHTGVVTQLIREARENQGDLSVIWLDLANAYGSIPHKLVTKALTIYHVPQKITDLIQDYYSSFCMRFTAGSITSAWHRLEKGIISGCTISVSLFALAMTMLVKAAEVECRGPLSRSGSRQPPIRAFMDDLTVTTTSVPGCRWLLKGLERLTSWARMTFKPAKCRSLVLRKGRVVRFYMNGLQIPSLTEKPVKSLGKLFDVTLRDTVAIQAMHAELKKWLAAVDRTGLPGKFKAWIYQHGILPRLLWPLLMYQVPITTVETLERNISQFLRRWLGLPKSLSCIALYGHSNKLQLPFSGLTEEFKVTRAREVLLYRDSSDTRVSSAGIEVRTGRKWKAQEAVQRAEARLRVLVGYVAVGRAGLGCHKTPRYDRAQGRDRRQMIQDEVRAEVEDERRSKTGAMRQQGAWTNWEHALTRKITWSELWRSEPARLKFLIQSVYDVLPSPANLHCWGLVETPSCPLCPARGSLEHILSCCPKALGEGRYRWRHDQVLKAVADTICAGIQQSKHKSLVRPYIVFIRAGEKPQSQPKVPAGLLSTAGDWQLKEDLGRQLKFPVHITSTTLLPDMVLISESTKQVVLLELTVPWEDRIEEAFERKKWKYQELVEDCRRKGWRARCEPIEIGCRGFPRQSLQRSLRLLGIRGAQGRKATRNICEAAEKASRWLWIKRGEVWLSALLGHKPGSDHPRLGRSGEGV

SEQ ID NO: 32742 - protein, 1082 aa, Trachurus trachurus
MTHANGITTTSAVCRCGKVCKNPRGLKIHQTKMGCLRTQVVQRTVSVPTTAPGETEEEPGPESPHSAQNLQPPQALPPSKPSEHRRVLWPAANQETEWRQFDEDVDAALEASAKGDVGRRLQTMSTLIITIAAERFGVKAQHTKSPTGPVPNRREAKIAQLRKELRSLRSQYRSASEEQKVALAELRDMVRGRLTTLRRAEWHRKKGKEKARRRSAFISNPFGFTKKLLGQKRSGHLACPVEEIDHFLEDTYSDSGREQDLGQCNTLISPPKPSIPFNIKEPTLKEVEEVIRSARASAAPGPSGVPYKVFKQCPRLRERLWKILKVIWRKEKVPQQWRFAEGVWIPKEENASKIEQFRTISLLCVECKIFFKILANRLIEYLLKNSFIDTSVQKGGVPGMPGCIEHTGVVTQLIREAREGKGDLAVLWLDLANAYGSIPHKLVEAALTKYHVPEKIRNLIFDYYNNFCLRVSSGSCTSAWHRLEKGIITGCTVSVSLFALAMTMLVKSAEAECRGPLSKSGTRQPPIRAYMDDLTVTTTSVPGCRWILQGLERLMSWARMSFKPAKSRSLVLRKGKVTEKFRFFLGDSKIPSVSEKPVRSLGKLFTSELKDSASRQSTGEDISSWLLAVDRSGLPGKFKAWIYQHGILPRLLWPLLVYEVPISTVESFERKINHFLRRWLGLPRCLSSIALYGRNTMLQMPFSSLVEEFKVTKAREVLLFRDSADSKVSSAGVEVRTGRKWRAQEAVDRAEARLRHKALLGTVAVGRAGLGCIPTPSLSRARGKERRTLIQAEVRAEEEEIRLSRMVGMGKQGAWTRWEHTTGRKISWADLWRSDPLRVKFLVQSVYDTLPSPANLFTWGLGESPACQLCQKKGSLEHILSCCSKALGEGRYRWRHDQVLRVVADTISNGISSSKFHHPTTGTISFVRAGEKPQPCRKAQGGLLSTARDWQLLVDLGKQLKFPACITTTTLRPDLVLMSEATKQVVVLELTVPWEERMEEAQERKRAKYAPLTEECRGQGWRARCEPFEVGCRGFAGRSLHRVLGLLGICGQRRRRATKNILEAAEKASRWLWIKRGDLWRS

SEQ ID NO: 32743 - protein, 630 aa, Thalassophryne amazonica
MDYYNSFNLRFTSGTVTSEYHRLEKGIITGCTISVILFALAMNMLVKSAELECGGPQTKSGIWQPPIRAFMDDLTVTTVSVPGCRGILQGLERLTTWARMRFKPEKSRSLVLKGRNVTDRFHFYLGGTRIPSVTEKPVKSLGKTFDCSLKDAASIRATNEQLESWLTTVDKSGLPGKFKVWLYQHGILPRILWPLLVYEFPISTVEGFERRISSRLRRWLGLPRSLSSIALYGNKTKLTLPIKSLTEEFRVIRAREVLQYRDSKDMKVSQAGIEVRTGRKWKAQEAVDQAEARLHHKELVGSVAIGRDGLGTIPTIHYNKTEGKVRQDLVQREVRAGVEEQRASQMVGLRQQGAWTRWEGAIERKISWPGLWKAEPYRIKFLIQSVYDVLPSPSNLFTWGKADTSACPLYQGRGTLEHILSSCPRALGDGRYRWRHDQVLKVVAESINTAIVQCESLKPLRQEISFVRAGEQPPTRPKAQTGVLGAGKDWQLRVDLGKQLRFPENILETSLRPDIVLFSESSKQVIMLELTVPWEERMEEASERKREKYAELVEECHRRGWHARCLPVEVGVRGFAGKSLCKAYSLLGITGARKRKAITAAFEAAERASRWLWIRRDKQWATASWTQAGI

SEQ ID NO: 32744 - protein, 1054 aa, Cephalopholis sonnerati
MRCVVAEQLEQRTGTNLGETQEEPGQESPHSAQNLQAPVAQAPPTSQQHPRVKWPPASSKNEWCQFNEDVDSILEATVMGGADRRLKTMTTIIVSLATERFGTVEKRATKGEYTKNRRAEKITQLRQELRLLKRQFKEASEEEKLGLAELRDILRKRLITLRRAEWHRRRTKERSRKRAAFLANPFGFTKQLLGQKRSGHLTCSKEDIDNHLQNTYSDAARGEELGECRALINIPTPTIDFNTKEPTLKEVQDVVKAARSSSAPGPSGVPYLVYKRCPKLTHRLWKILRVIWRRGKVAQQWRYAEGVWVPKEENSVKIEQFRTISLLSVEGKIFFSIVSKHLTEFLLKNHYIDTSVQKGGIPGVPGCLEHSGVVTQLIREAREGKGDLAVLWLDLTNAFGSIPHKLVQTALERHHIPSTIKDLILDYYDTFNLRFTSGPTTSEWHRLEKGIITGCTISVTLFALAMNMLAKSAEVECRGPVTKSGVRQPPIRAFMDDLTITTTSVPGCRWILQGLESLITWARMSFKPAKSRSLVLKRGKVTDRFRFSLDGIQIPSVSEKPIKSLGKTFNCSLKDAASIRATNQELEGWLKTVDRSGLPGKFKAWIYQHGILPRILWPLLVYEFPLSTVEGFERRISCHLRRWLGLPRSLSSIALYGNSNKLTLPFNSISEEFKVARAREVLQYRESKDPKVSQAGIEVRTGRKWRALDAVDQAESRLRHRALVGSVAVGRAGLGSTPTVNYRKARGKERRDLVQREVRAGVEELRASQMVGLRQQGAWTKWEQAVDRKVTWSELWQAEPFRIKFLIQSVYDVLPSPSNLFCWGKIESPSCPLCQGRGTLEHILSACPKALGEGRYRWRHDQVLKVIAESISSAIDQSKRHLPPRREIAFVRAGQHPKPRPKAQAGLLGSARDWQLKADLETQLKFPATIAETTLRPDIVLVSESSKQVVMLELTVPWEERIEEAHERKREKYNELVEECRRRGWRAMCLPIEVGGRGFAGKSLCKAYSLLGITGACKRKAIGRASEAAEKTSRWLWIKRDKPWTNASWTQAGS

SEQ ID NO: 32745 - protein, 1092 aa, Hirundichthys speculiger
MNAVCVCGKICKNPKGLKIHQTKMGCLVNRQSEQRSRISLGDSQEELGRDEPRNTQNPHAPEDLGETQEEPGQESTHSAQNLRAQEAQTPDIPQHQQRVKWPPSSKGSEWQQFDDDVDRILEATMKGGPDGKLQTITTLIISIATERFGLVEKRAAMNQYSKNRRAEKISQLWQELRNLKRQFKGASEDEKPGLAELRGVLRKRLLTLRRAEWHRRRAKERAKRRAAFLANPFGFTKQLLGQKRSGHLSCSKEEVDTYLHDTYSDASREEDLGECRALINPPAPTTELNTKVPSWKEVQMVVKAARNNSAPGPNGVPYLVYKRCPKLLHRLWKILRVIWRRGTVAQQWRSAEGVWFQRKRKSTTIEQFRTISLLNVEGKIFFSILSRRLSDYLLKNQYIDPSVQKGGIPGVPGCLEHSGVVTQLIREAREGKGDLAVLWLDLANAYGSIPHKLVEVALERHHVPGNIKTLIMDYYNSFHLRFTSGTVTSERQRLEKGIITGCTISVILFSLAMNMLAKSAEPECRGPKSKSGIRQPPIRAFMDDLTVTTVSVPGCRWILQGLERLTTWARMRFKPEKSRSLVLKRGKVTDRFHFSLGGTHIPSVTEKPVKSLGKTFDCSLKDAASIRATNEQLESWLTMVDKSGLPGKFKAWIYQHGILPRILWPLLVYEFPISTVEGFERRVSSRLRCWLGLPRSLSSIALYGKKNKLTLPINSLTEEFMVARAREVLLYRESKDPKVSQAGIEVRTGRKWRAKEAVDQAESRLCHKELVGAVATGRAGLGTIPSTQYNKLKGKQRRNQVQFEVRSGIEELRASQWVGLRQQGAWTRWEEATERKISWNELWRAEPLRIKFLIQSVYDVLPSPSNLFCWGKVESPACPLCQGRGTLEHILSSCPKALGEGRYRWRHDRVLKAVAESIHTAIEQSKRLQPSRREISFVRAGEQPPPRPKAQSGLLGTAKDWQLSVDLGKQLKFPENIVETRLRPDIVLVSETSKQIIMLELTVPWEERMEEARERKREKYAELVEECRNRGCGVLDAYRLRWGEEALQGSHSARSTASWASQGHIRGEPSLQLLRLQREPRGGCGSRGISSG

SEQ ID NO: 32746 - protein, 960 aa, Cyprinus carpio
MTTIIISLAAERFGLEEKRAAKPPYTMNNRASKIHQLRQELKTLRQQFKVASEEERGPLAELRSIIRKKLMTLRRAEGHRRRRKERSRRRAAFLANPFGFTKQLLGQKRSGQLTCSKAEVDHHLKQSYSDEYREQDLGPCRFLINPPAPALDFDGKEPGWKEIQEVVRRARASSAPGPSGVPYKVYKNCPRLLHRLWKILKVIWRRGRVADQWRQAEGVWIPKEEKSQKIDQFRTISLLSVEGKIFFSLISRRLTDYLLKNSYIDTSVQKGGTPEVPGCLEHTGVVTQLIREARENKGDLAVLWLDLANAYGSIPHKLVEEALNRHHTPKKFRDLILDYYANFYLRVSSGTTTSDWHKLEKGIITGCTISVILFALAMNMLVKSAEMQCRGPLSKSGVRQPPIRAFMDDLTVTTTSVPGCRWILNGLQELMSWARMNFKPAKSRSLVLKKGKVTDKFHFSLGTTKIPSLTEKPVKSLGKVFNCSLRDAASTKVTNQDLETWLAVVDKSGLPGKFKAWIYQHGILPRILWPLLVYEVPISTVEGFEMRISRFLRRWLGLPRSLSSIALYGQNNKLKLPMSSLSEEFMVTRSREVLQYRDCSDPKIAQAGIEVRTGRKWGAAVAVDDAESRVRQKVLVGSVAQGRAGLGSRRTPRYDKAEGKERRSLILEEVRAGVEEKRACQMAGMRQQGAWTRWEQTAEHKVTWTELWKAEPYRIKFLIQAVYDVYNPSPSNLFSWGKVETPACLLCQKRGMLEHILSCCPKALGEGRYRWRHDQVLKAVADSICSGISHSKSLRPVKTTAFVRAGEKSIPAARGTSSGLLVTARDWELSVDLGKQLKFPEAVAITTLRPDIVLTSEASKQVILLELTVPWEDRMEEANERKRAKYSQLVEGCRSNGWRAICQPVEVGFRGFVGQSLCRAYKMLGITGASQRRAIKLVTDAAEVASRWLWIRRGEAWRVG

SEQ ID NO: 32747 - protein, 1073 aa, Carassius gibelio
MTTIMECKCGKICKNRHGLRIHQAKKKCIQKEVESQRTGTTPGETQEEPGPETPHSARSLQVMQPPDAHRTSEHRRVKWPQASKEKEWRQFDEDADTILEATAKGRADRRLKTMTTIIISLAVERFGLEEKRAAKSPYTMNNRASKIHQLRQELKTLRQQFKVASEEERGPLAELRSIIRKRLMTLRRAEGHRRRRKERSRRRAAFLANPFGFTKQLLGQKRSGQLTCSKAEVDHHLKQSYSDEYRDQDLGPCRFLINPPAPALDFDGKEPGWKEIQEVVRRARANSAPGPSGVPYKVYKNCPRLLHRLWKILKVIWRRGRVADQWRQAEGVWIPKEEKSQKIDQFRTISLLSVEGKIFFSLISRRLTDYLLKNSYIDTSVQKGGTPGVPGCLEHTGVVTQLIREARENKGDLAVLWLDLANAYGSIPHKLVEEALNRHHTPKKFRDLILDYYANFHLRVSSGKTSSDWHKLEKGIITGCTISVILFALAMNMLVKSAEIQCRGPLSKSGVRQPPIRALMDDLTVTTTSVPGCRWILNGLQELMSWARMDFKPAKSRSLVLKKGKVTDKFHFSLGTSKIPSLTEEPVKSLGKVFNCSLRDTASTKATNQDLETWLAMVDKSGLPGKFKAWIYQHGILPRILWPLLVYEVPISTVEGFEMRISRFLRRWLGLPRSLSSIALYGQNNKLKLPMSSLSEEFMVTRSREVLQYRDSSDPKVAQAGIEVRTGRKWRATVAVDDAESRLRQKVLVGSVAQGRAGLGSRRAPRYDKAEGKERRSLILEEVRAGVEEKRACQMAGMRQQGAWTRWEQTVERKVTWTELWKAEPYRIKFLIQAVYDVLPSPSNLFSWGKVETPACPLCQKRGTLEHILSCCPKALGEGRYRWRHDQVLKAVADSICSGISHSKSLRPVKTTAFVRAGEKSTPAAQGTSSGLLATARDWELSVDLGKQLKFPEAVAITTLRPDVVLTSEASKQVILLELTVPWEDRMEEANERKRAKYSQLVEDCRSNGWRAICQPVEVGCRGFVGQSLCRAYKMLGITGASQRRAIKLATDAAEVASRWLWIRRGEAWRVGK

SEQ ID NO: 32748 - protein, 1081 aa, Pimephales promelas
MTTHSNENTTMIMECVCGKICKNRHGLRIHQAKMKCMQKEVESQRTGTTPGETQEEPGPESPHSARSLQVMLPTDAHRTSEHRRVKWPQASKEKEWRQFDGDVDTILEATAKGSADRRLKTMTTIIISLAADRFGLEEKRAAKLPYTMNNRASKIHQLRQELKNLRQQFKVASGEERGPLAELRSIIRKKLMTLRRAEWHRRRRRERSRRRAAFLVNPFGFTKQLLGQKRSGQLTCSKAEIDHHLKQTYSDEYREQDLGPCRFLINPPAPALDFDGREPGWKEIQEVVRRARANSAPGPSGVPYKVYKNCPRLLHRLWKILKVIWRRGKVVDHWRQAEGVWIPKEEKSQKIEQFRTISLLSVEGKTFFSLISRRLTDYLLKNSYIDTAVQKGGIPGVSGCLEHTGVVTQLIREARENKGDLAVLWLDLANAYGSIPHKLVEEALNRHHTPKKFKDLILDYYTNFHIRVSSGTTTSDWHKLEKGIITGCTISVILFALAMNMLVKSAEIQCRGPLSKSGVRQPPIRAFMDDLTVTTTSVPGCRWILNGLQELMSWARMNFKPAKSRSLVLKKGKVTNKFHFSLGTTKIPSLTEEPVKSLGKVFNCSLRDAASTKATNHDLETWLAAVDKSGLPGKFKAWIYQHGILPRILWPLLVYEVPISTVEGFEMRISRFLRRWLGLPRSLSSIALYGHNNKLKLPMSSLSEEFMVTRSREVLQYRESRDPKVAQAGIEVRTGRKWRAAVAVDDAESRLRQRVLVGSVAHGRAGLGSRRTPRYDKAEGKERRSLILEEVRAGVEEKRACQMAGMRQQGAWTRWEQTLERKVTWTELWKAEPHRIKFLIQAVYDELPSPSNLFSWGKVETPACPLCQRRGTLEHILSCCPKALGEGRYRWRHDQVLKAIADSICSGISHSKSIRPVKTTAFVKAGEKLIPAARGTSSGLLPTARDWELAVDLGKQLKIPEAVAITTLRPDIMLTSEASKQLILLELTVPWEDRMEEANERKRAKYSQLVEECRSNGWQTICQPVEVGCRGFVGHSLCRAYKMLGITGASQRRAIKLATDAAEAASRWLWIRRGEAWRVGQ

SEQ ID NO: 32749 - protein, 960 aa, Cyprinus carpio
MMTTIIISLAAERFGLEEKRAAKPPYTMNNRASKIHQLRQELKTLRQQFKVASEEERGPLAELRSIIRKKLMTLRRAEGHRRRRKERSRRRAAFLANPFGFTKQLLGQKRSGQLTCSKAEVDHHLKQSYSDEYREQDLGPCRFLINPPAPALEFQEKEPPWKEIQEVVRRARASSAPGPSGVPYKVYKNCPRLLHRLWKILKVIWRRGRVADQWRQAEGVWIPKEEKSQKIDQFRTISFLSVEGKIFFSLISRQLTDYLLKNSYIDTSVQKGGTPEVPGCLEHTGVVTQLIREARENKGDLAVLWLDLANAYRSIPHKLVEEALNRHHTPKKFRDLILDYYANFYLRVSSGTTTSDWHKLEKGIITGCTISVILFALAMNMLVKSAEMQCRGPLSKSGVRQPPIRAFMDDLTVTTTSVPGCRWILNGLQELMSWARMNFKPAKSRSLVLKKGKVTDKFHFSLGTTKIPSLTEKPVKSLGKVFNCSLRDAASTKVTNQDLETWLAVVDKSGLPGKFKAWIYQHGILPWILWPLLVYEVPISTVEGFEMRISRFLRRWLGLPRSLSSIALYGQNNKLKLPMSSLSEEFMVTRSREVLQYRDCSDPKIAQAGIEVRTGRKWRAAVAVDDAESRVRQKVLVGSVAQGRAGLGSRRTPRYDKAEGKERRSLILEEVRAGVEEKRACQMAGMRQQGAWTRWEQTAERKVTWTELWKAEPYRIKFLIQAVYDVLPSPSNLFSWGKVETPACLLCQKRGMLEHILSCCPKALGEGRYRWRHDQVLKAVADSICSGISHSKSLRPVKTTAFVRAGEKSTPAARGTSSGLLVTARDWELSVDLGKQLKFPEAVAITTLRPDIVLTSEASKQVILLELTVPWEDRMEEANERKRAKYSQLVEGCRSNGWRAICQPVEVGFRGFVGQSLCRANKMLGITGASQRRAIKLVTDAAEVASRWLWIRRGEAWRVG

SEQ ID NO: 32750 - protein, 1068 aa, Gouania willdenowi
MECICGKRCKNRHGLRIHQAKMKCVQKESESQRAGTTPGETPEEPGPESPHSARSLHVTLAPDVHGTSEHRRVKWPLASKEKEWLQFDEVADTILEATVKGEADRRLKAMTTIIISLAVEKFGLAEKRTVKLPYIMNNRASKIHQLRQELKRLKQQFKAASEEEKEPLAELRSIIRKRLMTLRRAEWHRRRRKERSRKRAAFLANPFGFTKQLLGQKCSGQLTCSKAEVDHYLKETYSDSCREQDLGPCRSLIDPPAPTWDFNGKEPAWKEIQEVVKRARASSAPGPSGVPYKVYKNCPRLLHRLWKILKVIWRKGKVADQWRQAEGVWIPKEEKSQNINQFRAISLLSVEGKIFFSLVSRRLTDFLLKNSYIDTSVQKGGIPKVSGCLEHTGVVTQLIREARENKGDLAVLWLDLANAYGSIPHKLVEEALNRHHVPKKVKDLILDYYSNFSLRVSSGSTTSDWHKLGKGIITGCTISVILFALSMNMLVKSAEVQCRGPFSKSGVRQPPIRAFMDDLTVTTTSVPGCRWILSGLEELISWARMSFKPAKSRSLVLKKGKVTGKFSFSLDTTKIPSLTEKPVKSLGKVFNCSLRDAASTQSTNQELETWLAAVDKSGLPGKFKAWIYQHGILPRILWPLLVYDFPISTVEGFEMRVSRFLRRWLGLPRSLSSIALYGQSNKLKLPMSSLSEEFMVTRSRELLQYRESSDPKVAQAGIEVRTGRKWRAAVAVDVAESRVRQRVLVGKVAQGRAGLGSGRTHFNKAKKRERRALILEEVRAGLEEKRASQMVGMQQQGAWMRWEQALERKITWTELWKAEPHRIKFLIQAVYDVLPSPSNLCIWGKAETPACPLCQRRGTLEHILSCCSKALGEGRYRWRHDQVLKAIANSICCGISHSKSLRPVKKSITFVRVGEKVAVTTQNTSPGLLATARDWVLKVDLGKQLKFPEEVAKTTLRPDIVITSVATKQVVLLELTVPWEDRMEEAHERKRAKYSELVEECRSNGWRARCQPIEVGCRGFAGQSLCRAYKMLGIAGASQRKAIKLATDAAEVASRWLWIRRGEEWHVG

SEQ ID NO: 32751 - protein, 1049 aa, Carassius auratus
MECKYSNGMECKYSKICKNRHGLRIHQAKKKCIQKEVESQHTGTTPGEMQEEPGPETPHSARSLQVMQPPDAHRTSEHRRVKWPQASKEKEWRQFDEDADTILEATAKGRADRRLKTMTTIIISLAAERFGLEEKRAAKPPYTMNNRASKIHQLRQKLKTLRQQFKVASEEERGPLAELRSIIRKRLMTLRRAEGHRRRRKVRSRRRAAFLVNPFGFTKQLLGQKRRGQLTCSKAEVDHHLEQSYSDEYREQDLGPCRFLINQPAPALDFDGKEPGWKEIQEVVRRARVNSTPGPSRVPYKVYKNCPRLLHRLWKILKVIWRRGRVADQWRQAEGVWIPKEEKSQKIDQFRTISLLSVEGKIFFSFISRRLTDYLLKNSYIDTSVQKGGTPGVPGCLEHTGVVTQLIREARENKGDLAVLWLDFANAYGSIPHKLVEEALNRHHTPKKFRDLILDYYANFHLRVSSGTTTSDWHKLEKGIITGCTISVILFALAMNMLVKSAEMQCRGPLSESGVRQPPIRAFMDDLTVTTTSVPGCRWILNGLQELMSWARMNFKPAKSRSLVLKKGKVTDKFHFSLGTTKIPSLTEEPVKSLGKVFNCSLRDAASTKATNQDLETWLAVVDKSGLPGKFKAWIYQHGILPRILWPLLVYEVPISTVEGFEMRISRFLRRWLGLPRSLSSIALYGQNNKLKLPMSSLSEEFMVTWSREVLQYRDSSDPKVAQAGIEVRTGRKWRATVAVDDAESRLRQKVLVGSVAQGRAGLGSRRAPRYDKAEGKERRSLILEEVRAGVEEKRACQMAGMRQQGAWTRWEQTVERKVTWTELWKAEPYRIKFLIQAVYDVLPSPSNLFSWGKVETPACPLCQKRGTLEHILSCCQKALGEWRYRWRHDQVLKAVADSICSGISHSKSLRPVKTTAFVRAGEKSTPAARGTSFGLLATTRDWELSVDLGKQLKFPEAVAITTLRPDVVLTSEASKQVILLELTVPWEDRMEEANERKRAKYSQLLEDCRSNGWRAICQPVEVGCRGFVGLQNAWHHRGEPAKGHQVGH

SEQ ID NO: 32752 - protein, 959 aa, Gouania willdenowi
MTTIIISLAVEKFGLAEKRTVKHPYIMNNRASKIHQLRQELKRLKQQFKAASEEEKEPLAELRSIIRKRLMTLRRAEWHRRRRKERSRKRAAFLANPFGFTKQLLGQKRSGQLTCSKAEVDHYLKETYSDSCREQDLGPCRSLIDPPAPTWDFNGKEPAWKEIQEVVKRARASSAPGPSGVPYKVYKNCPRLLHRLWKILRVIWRKGKVADQWRQAEGVWIPKEEKSQNINQFRAISLLSVEGKIFFSLVSRRLTDFLLKNSYIDTSVQKGGIPKVSGCLEHTGVVTQLIREARENKGDLAVLWLDLANAYGSIPHKLVEEALNRHHVPKKVKDLILDYYSNFSLRVSSGSTTSDWHKLGKGIITGCTISVILFALSMNMLVKSAEVQCRGPLSKSGVRQPPIRAFMDDLTVTTTSVPGCRWILSGLEELISWARMSFKPAKSRSLVLKKGKVTGKFSFSLGTTKIPSLTEKPVKSLGKVFNCSLRDAASTQSTNQELETWLAAVDKSGLPGKFKAWIYQHGILPRILWPLLVYDFPISTVEGFEMRVSRFLRRWLGLPRSLSSIALYGQSNKLKLPMSSLSEEFMVTRSRELLQYRESSDPKVAQAGIEVRTGRKWRAAVAVDVAESRVRQRVLVGKVAQGRAGLGSGRTHFNKAKKRERRALILEEVRAGLEEKRASQMVGMRQQGAWMRWEQALEHKITWTELWKAEPHRIKFLIQAVYDVLPSPSNLCIWGKAETPACPLCQRRGTLEHILSCCSKALGEGRYRWRHDQVLKAIANSICCGISHSKSLRPVKKSITFVRAGEKVVMTTQNTSPGLLATARDWVLKVDLGKQLKFPEEVAKTTLRPDIVITSVATKQVVLLELTVPWEDRMEEAHERKRAKYSELVEECRSNGWRARCQPIEVGCRGFAGQSLCRAYKMLGIAGASQRKAIKLATDAAEVASRWLWIRRGEEWHVG

SEQ ID NO: 32753 - protein, 1068 aa, Gouania willdenowi
MECICGQRCKNRHGLRIHQAKMKCVQKESESQRAGTTPGETPEEPGPESPHSARSLHVTLAPDVHGTSEHRRVKWPQASKEKEWLQFDEVADTILEATVKGEADRRLKAMTTIIISLAAEKFGLAEKRTVKLPYIMNNRASKIHQLRQELKRLKQQFKAASEEEKEPLAELRSIIRKRLMTLRRAEGHRRRRKERSRKRAAFLANPFGFTKQLLGQKRSGQLTCSKAEVDHYLKETYSDSCREQDLGPCRSLIDPPAPTWDFNGKEPAWKEIQEVVKRARASSAPGPSGVPYKVYKNCPRLLHRLWKILKVIWRKGKVADQWRQAEGVWIPKEEKSQNLNQFRAISLLSVEGKIFFSLVSRRLTDFLLKNSYIDTSVQKGEIPKVSGCLEHTGVVTQLIREARENKGDLAVLWLDLANAYGSIPHKLVEEALNRHHVPKKVKDLILDYYSNFSLRVSSGSTTSDWHKLGKGIITGCTISVILFALSMNMLVKSAEVQCRGPLSKSGVRQPPIRAFMDDLTVTTTSVPGCRWILSGLEELISWARMSFKPAKSRSFVLKKGKVTGKFSFSLGTTKIPSLTEKPVKSLGKVFNCSLRDAASTQSTNQELETWLAAVDKSGLLGKFKAWIYQHGILPRILWPLLVYDFPISTVEGFEMRVSRFLRRWLGLPRSLSSIALYGQSNKLKLPMSSLSEEFMVTRSRELLQYRESSDPKVAQAGIEVRTGWKWRAAVAVDVAESRVRQRVLVGKVAQGRAGLGSGRTHFNKAKKRERRALILEEVRAGLEEKRASQMVGMQQQGAWMRWEQALERKITWTELWKAEPHRIKFLIQAVYDVLPSPSNLCIWGKAETPACPLCQRRGTLEHILSCCSKALDEGRYRWRHDQVLKAIANSICCGISHSKSLRPVKKSITFVRAGEKVAVTTQNTSPGLLATARDWVLKVDLGKQLKFPEEVAKTTLRPDIVITSVATKQVVLLELTVPWEDRMEEAHERKRAKYSELVEECRSNGWRARCQPIEVGCRGFAGQSLCRAYKMLGIAGASQRKAIKLATDAAEVASRWLWIRRGEEWLVG

SEQ ID NO: 32754 - protein, 1068 aa, Gouania willdenowi
MECICGKRCKNRHGLRIHQAKMKCVQKESESQRAGTTPGETPEEPGPESPHSARSLHVTLAPDVHGTSEHRRVKWPQASKEKEWLQFDEVADTILEATVKGEADRRLKAMTTIIISLAAEKFGLAEKRTVKLPYIMNNRASKIHQLRQELKRLKQQFKAVSEEEKEPLAELRSIIRKRLMTLRRAEWHRRRRKERSRKRAAFLANPFGFTKQLLGQKRSGQLTCSKAEVDHYLKETYSDSCTEQDLGPCRSLIDPPAPTWDFNGKEPAWKEIQEVVKRARASSAPGPSGVPYKVYKNCPRLLHRLWKILKVIWRKGKVADQWRQAEGVWIPKEEKSQNINQFRAISLLSVEGKIFFSLVSRRLTDFLLKNSYIDTSVQKGGIPKVSGCLEHTGVVTQLIREARENKGELAVLWLDLANAYGSIPRKLVEAALNRHHVPKKVKDLILDYYSNFSLRVSSGSTTSDWHKLGKGIITGCTISVILFALSMNMLVKSAEVQCRGPLSKAGVRQPPIRAFMDDLTVTTTSVPGCRWILSGLEELISWARMSFKPAKSRSLVLKKGKVTGKFSFFLGTTKIPSLTEKPVKSLGKVFNCSLRDAASTQSTNQELETWLAAVDKSGLPGKFKAWIYQHGILPRILWPLLVYDFPISTVEGFEMRVSRFLRRWLGLPRSLSSIALYGQSNNLKLPMSSLSEEFMVTRSRELLQYRESSDPKVAQAGIEVRTGRKWRAAVAVDVAESRVRQRVLVGKVAQGRAGLGSDRTHFNKAKKRERRALILEEVRAGLEEKRASQMVGMRQQGAWMRWEQALERKITWTQLWKAEPHRIKFLIQEVYDVLPSPSNLCIWGKAETPACPLCQRRGTLEHILSCSSKALGEGRYRWRHDQVLKAIANSICCGISHSKSLRPVKKSITFVRAGEKVAVTTQNTSPGLLATARDWVLKVDLGKQLKFPEEVAKTTLRPDIVITSVATKQVVLLELTVPWEDRMEEAHERKRAKYSELVEECRSNGWRARCQPIKVGCRGFAGQSLCRAYKMLGIAGASQRKAIKLATDAAEVASRWLWIRRGEEWHVG

SEQ ID NO: 32755 - protein, 1068 aa, Gouania willdenowi
MECICGKRCKNRHGLRIHQAKMKCVQKESESQRAGTTPGETPEEPGPESPHSARSLHVTLAPDVHGTSEHRRVKWPQASKEKEWLQFDEVADTILEATVKGEADRRLKAMTTIIMSLAVEKFGLAEKRTVKLPYIMNNRASKIHQLRQELKRLKQQFKAASEEEKEPLAELRSIIRKRLMTLRRAEWHRRRRKERSRKRAAFLANPFGFTKQLLGQKRSGQLTCSKAEVDHYLKETYSDSCREQELGPCRSLIDPPAPTWDFNGKEPAWKEIQEVVKRARASSAPGPSGVPYKVYKNCPRLLHRLWKILKVIWRKGKVADQWRQAEGVWIPKEEKSQNINQFRAISLLSVEGKIFFSLVSRRLTDFLLKNSYIDTSVQKGGIPKVSGCLEHTGVVTQLIREARENKGDLAVLWLDLANAYGSIPHKLVEEALNRHHVPKKVKDLILDYYSNFSLRVSSGSTTSDWHKLGKGIITGCTISVILFALSMNMLVKSAEVQCRGPLSKSGVRQPPIRAFMDDLTVTTTSVPGCRWILSGLEELISWARMSFKPAKSRSLVLKKGKVTGKFSFPLGTTKIPSLTEKPVKSLGKVFNCSLRDAASTQSTNQELETWLAAVDKSGLPGKFKAWIYQHGILPRILWPLLVYDFPISTVEGFEMRVSRFLRRWLGLPRSLSSIALYGQSNKLKLPMSSLSEEFMVTRSRELLQYRESSDPKVAQAGIEVRTGRKWRAAVAVDVAESRVRQRVLMGKVAQGRAGLGSGRTHFNKAKKRERRALILEEVRAGLEEKRASQMVGMRQQGAWMRWEQALERKITWTELWKAEPHRIKFLIQAVYDVLPSPSNLCIWGKAETPACPLCQRRGTLEHILSCCSKALGEGRYRWRHDQVLKAIANSICCGISHSKSLRPVKKTITFVRAGEKVAVTTQNTSPGLLATARDWVLKVDLGKQLKFPEEVAKTTLRPDIVITSVATKQVVLLELTVPWEDRMEEAHERKRAKYSELVEECGSNGWRARCQPIEVGCRGFAGQSLCRAYKMLGIAGASQRKAIKLATDAAEVASRWLWIRRGEEWHVG

SEQ ID NO: 32756 - protein, 889 aa, Gouania willdenowi
MTLRRAEWHRRRRKERSRKRAAFLANPFGFTKQLLGQKRSGQLTCSKAEVDHYLKETYSDSCREQDLGPCRSLIDPPAPTWDFNGKEPAWKEIQEVVKRARASSAPGPSGVPYKVYKNCPRLLHRLWKILRVIWRKGKVADQWRQAEGVWIPKEEKSQNINQFRAISLLSVEGKIFFSLVSRRLTDFLLKNSYIDTSVQKGGIPKVSGCLEHTGVVTQLIREARENKGDLAVLWLDLANAYGSIPHKLVEEALNRHHVPKKVKDLILDYYSNFSLRVSSGSTTSDWHKLGKGIITGCTISVILFALSMNMLVKSAEVQCRGPLSKSGVRQPPIRAFMDDLTVTTTSVPGCRWILSGLEELISWARMSFKPAKSRSLVLKKGKVTGKFSFSLGTTKIPSLTEKPVKSLGKVFNCSLRDADSTQSTNQELETWLAAVDKSGLPGKFKAWIYQHGILPRILWPLLVYDFPISTVEGFEMRVSRFLRRWLGLPRSLSSIALYGKSNKLKLPMSSLSEEFMVTRSRELLQYRESSDPKVAQAGIEVRTGRKWRAAVAVDVAESRVRQRVLVGKVAQGRAGLGSGRTHFNKAKKRERRALILEEVRAGLEEKRASQMVGMRQQGAWMRWEQALERKITWTELWKAEPHRIKFLIQAVYDVLPSPSNLCIWGKAETPACPLCQRRGTLEHILSCCSKALGEGRYRWRHDQVLKAIANSICCGISHSKSLRPVKKSITFVRAGEKVVVTTQNTSPGLLATARDWVLKVDLGKQLKFPEEVAKTTLRPDIVITSVATKQVVLLELTVPWEDRMEEAHERKRAKYSELVEECRSNGWRARCQPIEVGCRGFAGQSLCRAYKMLGIAGASQRKAIKLATDAAEVASRWLWIRRGEEWHVG

SEQ ID NO: 32757 - protein, 1068 aa, Gouania willdenowi
MECICGKRCKNRHGLRIHQAKMKCVQKESESQRAGTTPGETPEEPGPESPHSARSLHVTLAPDVHGTSEHRRVKWPQASKEKEWLQFDEVADTILEATVKGEADRRLKAMTTIIISLAVEKFGLAEKRTVKHPYIMNNRASKIHQLRQELKRLKQQFKAASEEEKEPLAELRSIIRKRLMTLRRAEWHRRRRKERSRKRAAFLANPFGFTKQLLGQKRSGQLTCSKAEVDHYLKETYSDSCREQDLGPCRSLIDPPAPTWDFNGKEPAWKEIQEVVKRARASSAPGPSGVPYKVYKNCPRLLHRLWKILRVIWRKGKVADQWRQAEGVWIPKEEKSQNINQFRAISLLSVEGKIFFSLVSRRLTDFLLKNSYIDTSVQKGGIPKVSGCLEHTGVVTQLIREARENKGDLAVLWLDLANAYGSIPHKLVEEALNRHHVPKKVKDLILDYYSNFSLRVSSGSTTSDWHKLGKGIITGCTISVILFALSMNMLVKSAEVQCRGPLSKSGVRQPPIRAFMDDLTVTTTSVPGCRWILSGLEELISWARMSFKPAKSRSLVLKKGKVTGKFSFSLGTTKIPSLTEKPGKSLGKVFNCSLRDADSTQSTNQELETWLAAVDKSGLPGKFKAWIYQHGILPRILWPLLVYDFPISTVEGFEMRVSRFLRRWLGLPRSLSSIALYGKSNKLKLPMSSLSEEFMVTRSRELLQYRESSDPKVAQAGIEVRTGRKWRAAVAVDVAESRVRQRVLVGKVAQGRAGLGSGRTHFNKAKKRERRALILEEVRAGLEEKRASQMVGMRQQGAWMRWEQALERKITWTELWKAEPHRIKFLIQAVYDVLPSPSNLCIWGKAETPACPLCQRRGTLEHILSCCSKALGEGRYRWRHDQVLKAIANSICCGISHSKSLRPVKKSITFVRAGEKVVVTTQNTSPGLLATARDWVLKVDLGKQLKFPEEVAKTTLRPDIVITSVATKQVVLLELTVPWEDRMEEAHERKRAKYSELVEECRSNGWRARCQPIEVGCRGFAGQSLCRAYKMLGIAGASQRKAIKLATDAAEVASRWLWIRRGEEWHVG

SEQ ID NO: 32758 - protein, 959 aa, Gouania willdenowi
MTTIIMSLAVEKFGLAEKRTVKLPYIMNNRASKIHQLRQELKRLKQQFKAASEEEKEPLAELRSIIRKRLMTLRRAEWHRRRRKERSRKRAAFLANPFGFTKQLLGQKRSGQLTCSKAEVDHYLKETYSDSCREQDLGPCRSLIDPPAPTWDFNGKEPAWKEIQEVVKRARASSAPGPSGVPYKVYKNCPRLLHRLWKILKVIWRKGKVADQWRQAEGVWIPKEEKSQNINQFRAISLLSVEGKIFFSLVSRRLTDFLLKNSYIDTSVQKGGIPKVSGCLEHTGVVTQLIREARENKGDLAVLWLDLANAYGSIPHKLVEEALNRHHVPKKVKDLILDYYSNFSLRVSSGSTTSDWHKLGKGIITGCTISVILFALSMNMLVKSAEVQCRGPLSKSGVRQPPIRAFMDDLTVTTTSVPGCRWILSGLEELISWARMSFKPAKSRSLVLKKGKVTGKFSFSLGTTKIPSLTEKPVKSLGKVFNCSLRDAASTQSTNQELETWLAAVDKSGLPGKFKAWIYQHGILPRILWPLLVYDFPISTVEGFEMRVSRFLRRWLGLPRSLSSIALYGQSNKLKLPMSSLSEEFMVTRSRELLQYPESSDPKVAQAGTEVRTGRKWRAAVAVDVAESRVRQRVLMGKVAQGRAGLGSGRTHFNKAKKRERRALILEEVRAGLEEKRASQMVGMRQQGAWMRWEQALERKITWTELWKAEPHRIKFLIQAVYDVLPSPSNLCIWGKAETPACPLCQRRGTLEHILSCCSKALGEGRYRWRHDQVLKAIANSICCGISHSKSLRPVKKSITFVRAGEKVAVTTQNTSPGLLATARDWVLKVDLGKQLKFPEEVAKTTLRPDIVITSVATKQVVLLKLTVPWEDRMEEAHERKRAKYSELVEECRSNGWRARCQPIEVGCRGFAGQSLCRAYKMLGIAGASQRKAIKLATDAAEVASRWLWIRRGEEWHVG

SEQ ID NO: 32759 - protein, 1073 aa, Carassius auratus
MTTIMECKCGKICKNRHGLRIHQAKKKCIQKEVESQRTGTTPGEMQEEPGPETPHSARSLQVMQPPDAHRTSEHRRVKWPQASKEKEWRQFDEDADTILEATAKGRADRRLKTMTTIIISLAVERFGLEEKRAAKSPYTMNNRASKIHQLRQELKTLRQQFKVASEEERGPLAELRSIIRKRLMTLRRAEGHRRRRKERSRRRAAFLANPFGFTKQLLGQKRSGQLTCSKAEVDHHLKQSYSDEYREQDLGPCRFLINPPAPALDFDGKETGWKEIQEVVRRARANSAPGPSGVPYKVYKNCPRLLHRLWKILKVIWRRGRVADQWRQAEGVWIPKEEKSQKIDQFRTISLLSVEGKIFFSLISRRLTDYLLKNSYIDTSVQKGGTPGVPGCLEHTGVVTQLIREARENKGDLAVLWLDLANAYGSIPHKLVEEALNRHHTPKKFRDLILDYYANFHLRVSSGTTSSDWHKLEKGIITGCTISVILFALAMNMLVKSAEIQCRGPLSKSGVRQPPIRAFMDDLTVTTTSVPGCRWILNGLQELMSWARMNFKPAKSRSLVLKKGKVTDKFHFSLGTTKIPSLTEEPVKSLGKVFNCSLRDAASTKATNQDLETWLAMVDKSGLPGKFKAWIYQHGILPRILWPLLVYEVPISTVEGFEMRISRFLRRWLGLPRSLSSIALYGQNNKLKLPMSSLSEEFMVTWSREVLQYRDSSDPKVAQAGIEVRTGRKWRATVAVDDAESRLRQKVLVGSVAQGRAGLGSRRAPRYDKAEGKERRSLILEEVRAGVEEKRACQMAGMRQQGAWTRWEQTVERKVTWTELWKAEPYRIKFLIQAVYDVLPSPSNLFSWGKVETPACPLCQKRGTLEHILSCCQKALGEWRYRWRHDQVLKAVADSICSGISHSKSLRPVKTTAFVRAGEKSTPAARGTSFGLLATTRDWELSVDLGKQLKFPEAVAITTLRPDVVLTSEASKQVILLELTVPWEDRMEEANERKRAKYSQLVEDCRSNGWRAICQPVEVGCRGFVGQSLCRAYKMLGITGASQRRAIKLATDAAEVASRWLWIRRGEAWRVGK

SEQ ID NO: 32760 - protein, 914 aa, Carassius gibelio
MNNRASKIHQLRQELKTLRQQFKVASKEERGPLAELRSIIRKKLMTLRRAEGHRRRRKERSRRRAAFLANPFGFTKQMLGQKRSGKLTCSKAEVDHHLKQSYSDEYREQDLGPCRFFINLPAPALDFDRKEPGWKEIQEVVRRARANSAPGPSGVPYKVYKNCPRLLHRLWKILKVIWRRGRVADQWRQAEGVWVPKEEKSQRIDQFRTISMLSVEGKIFFSLISRRLTDYLLKNSYIDTSVQKEEPQEIPGCLEHTGMVTQLIMEARENKGDLAVLWLDLANAYGSIPHKLVEEALNRHHTPNKFRDLIQDYYANFHMRVSSGTTTSEWHKLEKGSITGCTISVMLFALAMNMLVKSAEMQCRGPLSKSGVRQPPIRAFMDDLTVTTASVPGCRWILNGLQELMSWAHMNFKPAKSRSLVLKKGKVTDKFQFSLGTTKIPSLTEEPVKSLGKVFNCSLRDAASTKVTIQDLETWLAVVDKSGLPGKFKAWIYQHGVLPRILWPLLVYEVPISTVEGFDMSFSRFLRRWLGLPRSLSSIALYGQNNKLKLLMSSLSEEFMVTRSREVLQYRDSSDPKVAQAGIEVRTWRKWRATVAVDDAESRLRQKVLVGSVAQGRAGLGSRRTPHYDKAEGKERRSLILEEVRAGVEEKRACQMAGMRQQGAWTRWEQTVERKVTWTELWKAEPYRIKFLIQAVYDVLPSPSNLFSWGKVETPACPLCQKKGTLEHILSCCPKVLGEGRYRWRHDQVLKADSICSGISQSKSLRPVKTTAFVRAGEKSTPGAQGTFSGLLATARDWELSVDLGKQLKFPEAVAITTLRPDIVLTSEASKQVILLELTVPWEDRMEEANERKRAKYSQLVEDCRSNGWRAICKPVEVGCQGLCANPFAGPTKCLASQGQASEGPSSWPLMVQK

SEQ ID NO: 32761 - protein, 1080 aa, Cyprinus carpio
MMTYGNENMTTTMECKCGKICKNRHGLRIHQAKRKCIQKEVESQRTGTTPGETQEEPGPESPHSALSLQVMQPPDAHRTSEHRRVKWPQASKEKEWRQFDEDADTILEATAKGRADRRLKTMTTIIISLAAERFGLEEKRAAKPPYTMNNRASKIHQLRQELKTLRQQFKVAREEERGPLAELRSIIRKKLMTLRRAEGHRRRRKERSRRRAAFLANPFGFTKQLLGQKRSGQLTCSKAEVDHHLKQSYSDEYREQDLGPCRFLINPPASALDFDGKEPGWKEIQEVVRRARASSAPGPSGVPYKVYKNCPRLLHRLWKILKVIWRRGRVADQWRQAEGVWIPKEEKSQKIDQFRTISLLNVEGKIFFSVISRRLTDYLLKNSYIDTSVQKGGTPEVPGCLEHTGVVTQLIRVTRENKGDLAVLWLDLANAYGSIPHKLVEEALNRHHTPKKFRDLILDYYANFYLRVSSGTTTSDWHKLEKGIITGCAISVILFALAMNMLVKSAEMQCRGPLSKSGVRQPPIRAFMDDLTVTTTSVPGCRWILNGLQELMSWARMNFKPAKSRSLVLKKGKVTDKFHFSLGTTKIPSLTEKPVKSLGKVFNCSLRDAASTKATNQDLETWLAVVDKSGLPGKFKAWIYQHGILPRILWPLLVYEVPISTVEGFEMRISRFLHRWLGLPRSLSSIALCGQNNKLNLPMSSLSEEFMETRSREVLQYQDSSDPKVAQAGIEVRTGRKWRAAVAVDDAESRLRQKVLVGSVAQGRAGLGSRRTPRYDKVEGKERRSLILEEVHAGVEEKRACQMAGMQQQGAWTRWEQTAERKVTWTELWKAEPYRIKFLIQAVYDMLPSPSNLFSWGKVETPACLLCQKRGTLEHILSCCPKALGEGRYRWRHDQVLKAVADSICSGISHSKSLRPVKTTAFVRAGEKSTPAKQGTPSGLLVTAHDWELSVDLGKQLKFPEAVAITTLRPDIVLTSEASKQVILLELTVPWEDRMEEANERKRAKYSQLVEGCRSNGWRAICQPVKVGCRGFVGQSLCRAYKMLGITGASQRRAIKLATDAAEVASRWLWIRRGEAWRVG

SEQ ID NO: 32762 - protein, 934 aa, Pimephales promelas
MNNRASKIHQLRQELKNLRQQFKVASGEERGPLAELRSIIRKKLMTLRRAEWHRRRRRERSRRRAAFLVNPFGFTKQLLGQKRSGQLTCSKAEIDHHLKQTYSDEYREQDLGPCRFLINPPAPALDFDGREPGWKEIQEVVRRARANSAPGPSGVPYKVYKNCPRLLHRLWKILKVIWRRGKVVDHWRQAEGVWIPKEEKSQKIEQFRTISLLSVEGKIFFSLISRRLTDYLLQNSYIDTAVQKGGIPGVSGCLEHTGVVTQLIREARENKGDLAVLWLDLANAYGSIPHKLVEEALNRHHTPKKFKDLILDYYTNFHIRVSSGTTTSDWHKLEKGIITGCTISVILFALAMNMLVKSAEIQCRGPLSKSGVRQPPIRAFMDDLTVTTTSVPGCRWILNGLQELMSWARMNFKPAKSRSLVLKKGKVTNKFHFSLGTTKIPSLTEKPVKSLGKVFNCSLRDAASTKATNHDLETWLAAVDKSGLPGKFKAWIYQHGILPRILWPLLVYEVPISTVEGFEMRISRFLRRWLGLPRSLSSIALYGHNNKLKLPMSSLSEEFMVTRSREVLQYRESRDPKVAQAGIEVRTGRKWRAAVAVDDAESRLRQRVLVGSVAHGRAGLGSRRTPRYDKAEGKERRSLILEEVRAGVEEKRACQMAGMRQQGAWTRWEQTLERKVTWTELWKAEPHRIKFLIQAVYDVLPSPSNLFSWGKVETPACPLCQRRGTLEHILSCCPKALGEGRYRWRHDQVLKAIADSICSGISHSKSIRPVKTTAFVKAGEKLIPAARGTSSGLLPTARDWELAVDLGKQLKIPEAVAITTLRPDIMLISEASKQLILLELTVPWEDRMEEANERKRAKYSQLVEECRSNGWRTICQPVEVGCRGFVGNSLCRAYKMLGITGASQRRAIKLATDAAEAASRWLWIRRGEAWRVGQ

SEQ ID NO: 32763 - protein, 1081 aa, Pimephales promelas
MTTHSNENMTMIMECVCGKICKNRHGLRIHQAKMKCMQKEVESQRTGTTPGETQEEPGPESPHSARSLQVMLPTDAHRTSEHRRVKWLQASKEKEWRQFDGDVDTILEATAKGSADRRLKTMTTIIISLAADRFGLEEKRAAKPPYTMNNRASKIHQLRQELKNLRQQFKVASGEERGPLAELRSIIRKKLMTLRRAEWHRRRRRERSRRRAAFLVNPFGFTKQLLGQKRSGQLTCSKAEIDHHLKQTYSDEYREQDLGPCRFLINPPAPALDFDGREPGWKEIQEVVRRARANSAPGPSGVPYKVYKNCPRLLHRLWKILKVIWRRGKVVDHWRQAEGVWIPKEEKSQKIEQFRTISLLSVEGKIFFSLISRRLTDYLLKNSYIDTAVQKGGIPGVSGCLEHTGVVTQLIREARENKGDLAVLWLDLANAYGSIPHKLVEEALNRHHTPKKFKDLILDYYTNFHIRVSSGTTTSDWHKLEKGIITGCTISVILFALAMNMLVKSAEIQCRGPLSKSGVRQPPIRAFMDDLTVTTKSVPGCRWILNGLQELMSWARMNFKPAKSRSLVLKKGKVINKFHFSLGTTKIPSLTEEPVKSLGKVFNCSLRDAASTKATNHDLETWLAAVDKSGLPGKFKAWIYQHGILPRILWPLLVYEVPISTVEGFEMRISRFLRRWLGLPRSLSSIALYGHNNKLKLPMSSLSEEFMVTRSREVLQYRESRDPKVAQAGIEVRTGRKWRAAVAVDDAESRLRQRVLVGSVAHGRAGLGSRRTPRYDKAEGKERRSLILEEVRAGVEEKRACQMAGMRQQGAWTRWEQTLERKVTWTELWKAEPHRIKFLIQAVYDVLPSPSNLFSWGKVETPACPLCQRRGTLEHILSCCPKALGEGRYRWRHDQVLKAIADSICSGISHSKSIRPVKTTAFVKAGEKLIPAARGTSSGLLPTARDWELAVDLGKQLKIPEAVAITTLRPDIMLTSEASKQLILLELTVPWEDRMEEANERKRAKYSQLVEECRSNGWRTICQPVEVGCRGFVGYSLCRAYKMLGITGASQRRAIKLATDAAEAASRWLWIRRGEAWRVGQ

SEQ ID NO: 32764 - protein, 1079 aa, Carassius gibelio
MACLRRDQVKLRSGTAAGAAVTVTPAAEPGETEEEPGPESPHSTRNLHATQIPPPSRKSEHRRVKWPAANNKEWLKLDEDVDKCLESISRGSVDHKLQTMCTIIMNMGAERFGVEERRGGRNPAKLNRREAKISQLRQELKSLRRQFKMAKEEERAALSELTNIIRKRLISLRRAERHRRKGKERAQKRSAFIGNPFSFIKKLLGQKQSGHLACPVEEIDNHLHATFSDTLRDHDLEPCRDLVAPPEPGIQFDSAEPTLKEVEEAVRAARSSSAPGPSGVPYKVYKQCPQLLRRLWKILKVIWRRGKVAAQWRYAEGVWIPKEEGSCNIDQFRIISLLSVESKVFFKIVSQRLTDFLLKNSYIDTSVQKGGVPGVPGCLEHTGVVTQLIREAKESKGDLATLWLDLANAYGSIPHKLVETALVRHHVPIKIRNLIMDYYYNFSARVSSGQVTSSWHQLEKGIITGCTISVSLFSLAMNMIVKSAEVECRGPKSKSGTRQPPIRAFVDDLTVMTTSVPGCRWLLQGLERLISWARMSFKPAKSRSLVLRKGKVSDRFRFALGETMIPSVTEKPVKSLGKFFDSSLKDSAAIKQTKCDLTTWLTAIDRCGLPGKFKTWIYQHGVLPRILWPLLVYEVPTSTVEVLEKSISQFLRKWLGLPRSLSSIALYGHSTKLHLPLSGLSEEFKVTRSREVLMYRDSKDTKVAAAGILVKTGRKWQAQEAVTKAEARLRHKTLVGSVAMGRAGLGCFPKPRYDLAHGKERRKLIQDEIRAEVEEERYTKMASMSKQGAWTRWEHADPRRITWAELWKAEPFRIKFLVQSVYDVLPSPANLHTWVLADTPECKLCKKRGTLEHILSSCSRALGEGWYRWRHDQVLKALADSIYTAIQLSKTQVAPKQTITFIRAGQKEQFHRPSSTVGLLSTARDWQVQVDLGRQLKFPGNITATSLRPDMVLTSESTKQVVILELTVPWEDRIEEAHERKRAKYAGLSSECRNNGWKTRCEPVEVGCRGFAGHSLMRTLKLLGVKGLQLKKATTNILEAAERASRWLWIRRGDPWSNLPLGHKPGTDHPRLGRPGEGV

SEQ ID NO: 32765 - protein, 1180 aa, Cyprinus carpio
MTCPSSTRRCIQTLTYLAQPVTSRKVWMTSTNRVATAGETADSSERWQPGQGGLAPRPAAPEREHPQQATKNPTEIYPQGYPRGGENEHPNRTELPVTTQANGQRITSAVCICGKVCKNLKGLKIHQAKMACLRRDQVKLRSGTAAGAVVTVMPAAEPGETEEEPGPESPHSTRNLQATQIPPPSRKSEHRRVKWPGANNKEWLKLDEDVDKCLESISKGSVDQKLQTMCTIIMNMGAERFGVEERRGDRNPAKLNRREAKISQLRQELKSLRRQFKMAKEEERTALSELTNIIRKRLISLRRAERHRRKGKERARKRSAFIGNPFSFIKKLLGQKRSGHLACPVEEIDNHLHATFSDTLRDHDLEPCRDLVAPPEPGIQFDSAEPTLKEVEEAVRAARSSSAPGPSGVPYKVYKQCPQLLRRLWKILKVIWRRGKVAAQWRYAEGVWIPKEEGSCNIDQFRIISLLSVESKIFFKIVSQRLTDFLLKNNYIDTSVQKGGVPGVPGCLEHTGVVTQLIREAKESKGDLATLWLDLANAYGSIPHKLVETALVRHHVPVKIRNLIMDYYNNFSARVSSGQVTSSWHQLEKGIITGCTISVSLFSLAMNMIVKSAEVECRGPKSKSGTRQPPIRAFMDDLTVMTTSVPECRWLLQGLERLISWARMSFKPAKSRSLVLKKGKVSDRFRFALGETMIPSVTEKPVKSLGKFFDSSLKDSAAIKQTKCDLTTWLTAIDRCGLPGKFKTWIYQHGVLPRILWPLLVYEVPTSTVEVLEKSISQFLRKWLGLPRSLSSIALYGHSTKLHLPLSGLSEEFKVTRSREVLMYRDSKDTKVAAAGILVKTGRKWQAQEAVTKAEARLRHKTLVGSVAMGRAGLGCFPKPRYDLARGKERRKLIQDEIRAEVEEERYTKMASMSKQGAWTRWEQADPRRITWAELWKAEPFRIKFLVQSVYDVLPSPANLHTWGLADTPECKLCKKRGTLEHILSSCSRALGEGRYRWRHDQVLKALADSICTAIQLSKTQAAPKQTITFIRAGQKEQFHRPSSTGGLLSTARDWQLQVDLGRQLKFPGNITATSLRPDMVLTSESTKQVVILELTVPWEDRIEEAHERKRAKYAWAQLGVPEQRLENSLRASRGRVPRLRWPLTAANPQTPWSERTAIEKSHRKHLRGRREGFSVAVDP

SEQ ID NO: 32766 - protein, 1050 aa, Carassius auratus
MACLRRDQVKLRSGTAAGAAVTVTPAAEPGETEEEPGPESPHSTRNLHATQIPTPSRKSEHRRVKWPAANNKEWLKLDEDVDKCLESISRGSVDQKLQTMCTIIMNMGAERFGVEERRGGRNPAKLNRREAKISQLRQELKSLRRQFKMAKEEERAALSELTNIIRKRLISLRRAERHRRKGKERAQKRSAFIGNPFSFIKKLLGQKQSGHLACPVEEIDNHLHATFSDTLRDHDLEPCRDLVAPPEPGIQFDSAEPTLKEVEEAVRAARSSSAPGPSGVPYKVYKQCPQLLRRLWKILKVIWRRGKVAAQWRYAEGVWIPKEEGSCNIDQFRIISLLSVESKIFFKIVSQRLSDFLLKNSYIDTSVQKGGVPGVPGCLEHTGVVTQLIREAKESKGDLATLWLDLANAYGSIPHKLVETALVRHHVPVKIRNLIMDYYYNFSARVSSGQVTSSWHQLEKGIITGCTISVSLFSLAMNMIVKSAEVECRGPKSKSGTRQPPIRAFVDDLTVMTTSVPGCRWLLQGLERLISWARMSFKPAKSRSLVLRKGKVSDRFRFALGETMIPSVTEKPVKSLGKFFDSSLKDSAAIKQTKCDLTTWLTAIDRCGLPGKFKTWIYQHGVLPRILWPLLVYEVPTSTVEVLEKSISQFLRKWLGLPRSLSSIALYGHSTKLHLPLSGLSEEFKVTRSREVLMYRDSKDTKVAAAGILVKTGRKWQAQEAVTKAEARLRHKTLVGSVAMGRAGLGCFPKPRYDLAHGKERRKLIQDEIRAEVEEERYTKMASMSKQGAWTRWEHADPRRITWAELWKAEPFRIKFLVQSVYDVLPSPANLHTWGLADTPECKLCKKRGTLEHILSSCSRAVGEGRYRWRHDQVLKALADSIYTAIQLSKTQVAPKQTITFIRAGQKEQFHRPSSTVGLLSTARDWQLQVDLGRQLKFPGNITATSLRPDMVLTSESTKQVVILELTVPWEDRIEEAHERKRAKYAGLSSECRNNGWKTLQASRGRVPRLRWPLTDANPQTPWSERTAIEKSHHKHLRGRREGFSVAVDP

SEQ ID NO: 32767 - protein, 1078 aa, Carassius auratus
MACLRRDQVKLRSGTAAGAAFTVTPAAEPGETEEEPGPESPHSTRNLHATQIPPPSRKSEHRAVKWPAANNKEWLKLDEDVDKCLESISRGSVDQKLQTMCTIIMNMGAERFGVEERRGGRNPAKLNRREAKISQLRQELKSLRRQFKMAKEEERAALSELTNIIRKRLISLRRAERHRRKGKERAQKRSAFIGNPFSLIKKLLGQKQSGHLACPVEEIDNHLHATFSDTLRDHDLEPCRDLVAPPEPGIQFDSAEPTLKEVEEAVRAARSSSAPGPSGVPYKVYKQCPQLLRRLWKILKVIWRRGKVAAQWRYAEGVWIPKEESSCNIDQFRIISLLSVERKIFFKIVSQRLSDFLLKNSYIDTSVQKGGVPGVPGCLEHTGVVTQLIREAKESKGDLATLWLDLANAYGSIPHKLVETALFHHVPIKIRNLIMDYYYNFSARVSSGQVTSSWHQLEKGIITGCTISVSLFSLAMNMIVKSAEVECRGPKSKSGTRQPPIRAFVDDLTVMTTSVPGCRWLLQGLERLISWARMSFKPAKSRSLVLRKGKVSDRFRFALGETMIPSVTEKPVKSLGKFFDSSLKDSAAIKQTKCDLTTWLTAIDRCGLPGKFKTWIYQHGVLPRILWPLLVYEVPTSTVEVLEKSISQFLRKWLGLPRSLSSIALYGHSTKLHLPLSGLSEEFKVTRSREVLMYRDSKDTKVAAAGILVKTGRKWQAQEAVTKAEARLRHKTLVGSVAMGRAGLGCFPKPRYDLAHGKERRKLIQDEIRAEVEEERYTKMASMSKQGAWTRWEHADPRRITWAELWKAEPFRIKFLVQSVYDVLPSPANLHTWGLADTPECKLCKKRGTLEHILSSCSRALGEGRYRWRHDQVLKALADSIYTAIQLSKTQVAPKQTITFIRAGQMEQFHRPSSTVGLLSTARDWQLQVDLGRQLKFPGNITATSLRPDMVLTSESTKQVVILELTVPWEDRIEEAHERKRAKYAGLSSECRNNGWKTRCEPVEVGCRGFAGHSLMRTLKLLGVKGLQLKKATTNILEAAERASRWLWIRRGDPWSNLPLGHKPGTDHPRLGRPGEGV

SEQ ID NO: 32768 - protein, 1079 aa, Carassius gibelio
MACLRRDQVKLRSGTAAGAAVTVTPAAEPGETEEEPGPESPHSTRNLHAKQIPPPSRKSEHRRVKWPAANNKEWLKLDEDVDKCLESISRGSVDQKLQTMCTIIMNMGAERFGVEERRGGRNPAKLNRREAKISQLRQELKSLRRQFKMAKEEERAALSELTNIIRKRLISLRRGERHRRKGKERAQKRSAYIGNPFSFIKKLLGQKQSGHLACPVEEIDNHLHATFSDTLRDHDLEPCRDLVAPPEPGIQFDSTEPTLKEVEEAVRAARSSSAPGPSGVPYKVYKQCPQLLRRLWKILKVIWRRGKVAAQWRYTEGVWIPKEEGSCNIDQFCIISLLSVESKIFFKIVSQRLSDFLLKNTYIDTSVQKGGVPGVPGCLEHTGVVTQLIREAKESKGDLATLWLDLANAYGSIPHKLVETALVRHHVPVKIRNLIMDYYYNFSARVSSGQVTSSWHQLEKGIITGCTISVSLFSLAMNMIVKSAEVECRWPKSKSWTRQPPIRAFVDDLTVMTTSVPGCRWLLQGLERLISWARMSFKPAKSRSLVLRKGKVSDRFRFALGETMIPSVTEKPVKSLGKFFDSSLKDSAAIKQTKCDLTTWLTAIDRCGLPGKFKTWIYQHGVLPRILWPLLVYEVPTSTVEVLEKSISQFLRKWLGLPRSLSSIALYGHSTKLHLPLSGLSEEFKVTRSREVLMYRDSKDTKVAAAGILVKTGRKWQAQEAVTKTEARLRHKTLVGSVAMGRAGLGCFPKPRYDLAHGKERRKLIQDEIRAEVEEERYTKMASMSKQGAWTRWEHADPRRITWAELWKAEPFRIKFLVQSIYDVLPSPANLHTWGLADTPECKLCKKRGTLEHILSSCSRALGEGRYRWRHDQVLKALADSICTAIQLSKTQAAPKQTITFIRAGQKEQFHRPSSTVGLLSTARDWQLQVDLGRQLKFPGNITATSLRPDMVLTSESTKQVVILELTVPWEDRIEEAHERKRAKYAGLSSERRNNGWKTRCEPVEVGCRGFAGHSLMQTLKLLGVKGLQLKKATSNILEAAERASRWLWIRRGDPWSNLPLGHKPGTDHPRLGRPGEGV

SEQ ID NO: 32769 - protein, 1051 aa, Carassius gibelio
MACLRRDQVKLRSGTAAGAAVTVTPAAEPGETEEEPGPESPHSTRNLHATQIPPPSRKSEHRRVKWPAANNKEWLKLDEDVDKCLESISRGSVDQKLQTMCTIIMNMGAERFGVEERRGGRNPAKLNRREAKISQLRQELKSLRRQFKMAKEEERAALSELTNIIRKRLISLRRAERHRRKGKERAQKRSAFIGNPFSFIKKLLGQKQSGHLACPVEEIDNHLHATFSDTLRDHDLEPCRDLVAPPEPGIQFDSAEPTLKEVEEAVRAARSSSAPGPSGVPYKVYKQCPQLLRRLWKILKVIWRRGKVAAQWRYAEGVWIPKEEGSCNIDQFRIISLLSVESKIFFKIVSQRLSDFLLKNTYIDTSVQKGGVPGVPGCLEHTGVVTQLIREAKESKGDLATLWLDLANAYGSIPHKLVETALVRHHVPVKICNLIMDYYYNFSARVSSGQVTSSWHQLEKGIITGCTISVSLFSLAMNMIVKSAEVECRGPKSKSGTRQPPIRAFVDDLTVMTTSVPGCRWLLQGLERLISWARMSFKPAKSRSLVLRKGKVSDRFRFALGETMIPSVTEKPVKSLGKFFDSSLKDSAAIKQTKCDLTTWLTAIDRCGLPGKFKAWIYQHGVLPRILWPLLVYEVPTSTVEVLEKSISQFLRKWLGLPRSLSSIALYGHSTKLHLPLSGLSEEFKVTRSREVLMYRDSKDTKVAAAGILVKTGRKWQAQEAVTKAEARLRHKTLVGSVAMGRAGLGCFPKPRYDLAHGKERRKLIQDEIRAEVEEERYTKMASMSKQGVWTRWEHADPRRITWAELWKAEPFRIKFLVQSVYDVLPSPANLHTWGLADTPECKLCKKRGTLEHILSNCSRALGEGRYRWRHDQVLKALADSICTAIKLSKTQAAPKQTITFIRAGQKEQFHRPSSTVGLLSTARDWQLQVDLGRQLKFPGNITATSLRPDMVLTSESTKQVVILELTVPWEDRIEEAHERKRAKYAGLSSECRNNGWKTRCEPVEVGCRGFAGHSLMRTLKLLGVKGLQIEKSHHKHLRGRREGFSVAMDP

SEQ ID NO: 32770 - protein, 1075 aa, Oryzias javanicus
MGCLKGGRVKQRTGAVARTSEARVIDPGQTEEEPGPELPHSARNLRAASVPLQLGKPEHRRVKWPAANNKEWHQFDEDVDKIMEITSKGNADQKLRTMCTIIMSIGVERFGVKEKTSSKPARPNRREYKISQLRQELKTLKRKFRTAKEEEKSALSELRECLRRKLITLRRAEQHRRKGKERAKKRKAFISNPFSFIKRLLGQKKSGNLSCPLEEINQHLKVAFSDPLRDQDLGPCKVLVKPPEPMVQFNTSEPTWKEVKEVVMAARSSSSPGPSGVPYRVYKQCPKLLLRLWRLIKVIWRRGRVADQWRSAEGVWIPKEEEASNIDQFRIISLLCVEGKVFFKIMSQRLMEFLLKNGYIDTSVQKGGVPGVPGCLEHTGVISQLIREAREGRGDLATLWLDLTNAYGSIPHKLVETALKRHHVPEAVTSLLMDYYNNFQLRVTSGASTSAWQRLEKGIITGCTISVPLFSLAMNMIVKSAEVECRGPMSRTGTRQPPIRAFMDDLTVTATSVPGCRWLLQGLERLISWARMSFKPAKSRSLVLKKGRVADNFRFTIGGSLIPTVTEKPVKSLGKVFNSSLRDTNVLQQTREDLSTWLVAIDKSGLPGKFKTWMYQHGVLPRLLWPLLVYEVPMSTVETLERTISQFLRRWLGLPRSLSSIALYGHSTMLQLPISGLSEEFKVTRARELMMYRDSSDKKVSSAGIMVKTGRKWKAQEAVNRAEARLQHSVLVGNIAVGRAGLGRFVRPSYNKARGRERRQMVQDEIRAEVEEERRIKMVAMYQQGAWTKWDHVEERRVTWSDLWRCEPQHIKFLIQSVYDVLPSPTNLQRWGLSDTALCQLCQKRGTLEHILSSCSKALVEGRYRWRHDQVLRALADTVSTAITNCKYQHTSKQFITFVRAGQKTWQQPSLTGGLLTTARDWKLQVDLGRQLKFPEHIATTALRPDMVLTSESSKQVVLIELTVPWEDRMEEANERKRAKYAELVAECRSRGWKARCEPVEVGSRGFAGQSLPRTLKLLGVKGQLCRRAIKNIIEAAEKASRWLWIRRGDPWSSGPLGHKSGADHPWLGRPSEGV

SEQ ID NO: 32771 - protein, 971 aa, Onychostoma macrolepis
MCTLIMGIGTERFGVTEKRGTTTPSLLNRREIKISQLRQELRSLKRQYKAAKEEQKTALAELREIVRRRLTTLRRAEWHRKKGKERARKRRAFISNPFGFTKRLLGQKKSGNLTCSVEEMNHHLSITFSDSAREQDLGPCEKLIEPPEPVVQFNISGPTLKEVKDAVMAARSSSTPGPSGVPYRVYKQCPKLLVRLWKILKVFWQRGKAAPQWRSAEGFWIPKEENASTIEQFRIIWLLCVEGKIFFKIVSQRLMEFLLKNGYIDTSVQKGGVPGVTGCLEHTGVVSQLIREAKENRGDLAVLWLDLTNAYGSIPHKLVKEALTRHHVPEAIRNLILDYYNSFRLRVSSGTITSAWQRLEKGIITGCTISVPLFALAMNMIVKSAEVECRGPMSKSGTRQPPIRAFMDDLTVTTASVPGCRWLLQGLQRLILWARMSFKPAKSKSLVLKKGKVVDRFRFTLEGSQIPSVTERPFKSLGKIFDSSLKALAALQQTRNDVASWLTAVDKSGLPGKYKTWMYQHRILLRLLWPLLVYEVPMTTVEALERTISQFLRRWLGLPRSLSNIALYGQSTKLQLPISSLSKEFKVTRAREILMYRDSSDAKVSSAGICVKTGRKWQAQKAVDRAEVRLKHGVLVGNVAVGRAGLGSFSKPRYDKARGREKHQLVQNEVRAEVEEERLTKMVGMRQQGAWTRWENAEQRKITWADLWSSEPLRIKFLISSVYDLLPSPSNLHRWGLVDSPACQLCQRSGTLEHILSCCPKALGDGLYRWRHDQVLRALADTITSAIQSSKSQHPSKRTISFVRAGEKAQQQPRSPGGLLANARDWHLQVDLGRQLKFPNHITATSLRPDMVITSESTRQVVIVELTVPWEDRLEEANDRKRVKYAELVEECRSGGWKARSEPVEVGCRGFAGQSLLRTLKLLGVKGQLCRRAIKNISQAAEKASRWLWIRRGDPWSSMPLGHRPGTDHPR

SEQ ID NO: 32772 - protein, 1062 aa, Onychostoma macrolepis
MTQANGQPTTSTVCICGKVCKNPTGLKIHQTKMACLKGGRMQQRTGAVAGTSVSGVPVAEPGQTEEEPGPEPHHSARNLQAAPASSQSRKPEQRRVKWPTANKKDWHQFDEDLDKILESTCKGNVEQKLHTMCTLIMGIGKERFGVTEKRGTTTPSLLNRREIKISQLRQELRSLKRQYKAAKEEQKTALAELREIVRRRLTTLRRAEWHRKKGKERARKRKAFISNPFGFTKRLLGQKKSGNLTCSVEEMNHHLSITFSDSAREQDLGPCEKLIEPPEPVVQFNISGPTLKEVKNAVMAARSSSAPGPSGVPYRVYKQCPKLLVRLWKILKVFWQRGKVAPQWRSAEGFWIPKEENASTIEQFRIISLLCVEGKIFFKIVSQRLMEFLLKNGYIDTSVQKGGVPGVPGCLEHTGVVSQLIREAKENRGDLAVLWLDLTNAYGSIPHKLVKEALARHHVPEAIRNLILDYYNSFRLRVSSGTVTSAWQRLEKGIITGCTISVPLFALAMNMIVKSAEVECRGPMSKSGTRQPPIRAFMDDLTVTTASVPGCRWLLQGLQRLILWARMSFKPVKSRSLVLKKGKVVGRFRFTLEGSQIPSVTERPVKSLGKIFDSSLKASATLQQTRNDVASWLTAVDKSGLPGKYKTWMYQHGILPRLLWPLLVYEVPMTTVEALERTISQFLRRWLGLPRSLSNIALYGQSTKLQLPISSLSEEFKVTRAREVLMYRDSSDAKVSSAGICVKTGRKWQAQKAVDRAEVRLKHGVLVGNVAVGRAGLGSFSKPRYDKARGREKRQLVQNEVRAEVEEERLTKMVGMRQQGAWTRWENVEQRKITWADLWSSEPLRIKFLISSVYDLLPSPSNLHRWGLVDSPACQLCQRSGTLEHILSCCPKALGDGRYRWRHDQVLRALADTITAAIQSSKSQHPSKHTISFVRAGEKAQQQPRSPGGLLANARDWHLQVDLGRQLKFPNYITATSLRPDMVITSESTRQVVIVELTVPWEDRLEEANERKRAKYAELVEECRSGGWKARSEPVEVGCRGFAGQSLLRTLKLLGVKGQLCR

SEQ ID NO: 32773 - protein, 839 aa, Salarias fasciatus
MSTEKLTWDYGSGGLPGSSFKSHYLLFQMRKSWFRLRLRRGQKYSRSAVCFFLVRLWKIIKVIWRRGRVATQWRSAEGVWIPKEEEASNIEQFRIISLLCVEGKIFFKIVAQRLTDFLLKNGYIDTSVQKGGVPGVPGCLEHTGVVSQLIREARESRGDLATLWLDLTNAYGSIPHKLVETALTRHHVPVTITNLILDYYNNFQLRVTSGPLTSAWQRLEKGIITGCTISVPLFSLAMNMIVKSAEVECRGPLSRSGTRQPPIRAFMDDLTVTSTSVPGCRWLLQGLERLISWARMSFKPTKSRSLVLKKGRVADRCRFAIGGTPIPTVMDKPVKSLGKVFNSSLRDSDSLQKTKAELTSWLIAIDKSGLPGKFKTWIYQHGVLPRLLWPLLVYEVPMSTVETLERTISQFLRRWLGLPRSLSSIALYGHSTMLQLPISGLSEEFMVTRAREVMMYRDSADKKVATAGILVKTGRKWKAKEAVDRAEARLQHNILVGNTAVGRVGLGSFPKPCYGKARGREKRHMVQEEIRAEVEEDRWVKMVAMYQQGAWTRWDHAEQRKTTWPELWRLEPQHIKFLIQSVYDVLPSPTNLQRWGLANTAACQLCQRRATLEHILSCCPKALGEGRYRWHHDQVLRALADTLSTAMTNCRYQHNPKQFITFVRAGDKVEHQTSSSGGLLTTARDWKLRVDLGRHFKFPEIILATTLRPDVVLTSESTKQVVLVELTVPWEDRLEEANERKRVKYAERVTECRSNGWKACCEPVEVGCRGFAGQSLSRTLKLLGVKGQLCRRAIKNITEAVEKASRWLWIRRGDPWSSGPLGHKSGADHPRLGRPSEGV

SEQ ID NO: 32774 - protein, 978 aa, Megalobrama amblycephala
MSTLIISIGAERFGIKVPKAQNIARPNRRETKISQLRKELKVLNRQYKRASEEEKPALTELRDILRQKLISLRRAERHRRRGRERGRKRMTFIANPFRFTKQLLGQKRSGTLRCPKEEINQHLSDKYSDSRREENLPSCRELPTPPEPSFQFNIKEPTLAEVRDIVRTARTSAAPGPSGVPYKVYKHCPRLLERLWRLIRVVWRRGKVAQQWRHAEGVWIPKEENASDITQFRTISLLSVEGKIFFKILANRLSEYLMRNSYIDTSVQKGGVPGMPGCLEHTGVITQLIREARENRGDLAVLWLDLADAYGSIPHKLVTTALTIHHIPEKIIELIRDYYSSFSLRFTSGTVTSAGHRLEKGIITGCTISVVLFSLAMSMLVKAAEVECRGPLSRSGIRQPPIRAYMDDLTVTSTSVTGCRWLLRGLERIMAWARMTFKPAKSRSLVLRKGRVEDKHRFYVDGVTIPTVSEKPVKSLGKIFDSTLKDKAAVEAAHMELKTWLSVVDKSGLPGKFKAWIYQHGILPRLLWPLLIYEVPVSLVEGFERNISQYLRRWLGLPKSLSSIALYGHNNKLQLPFTGLTEEFKVTRAREVLLYRDSADTRVSSAGITVRTGRKWRAQEAVDQAEARLRHSVLVGSVAVGRAGLGSHTRPRYDKAQGRERRQMVQREIRAEVEEERLSRTVAMRQQGAWANWNYAAARKITWTELWKYEPARLKFLIQSVYDVLPSPSNLYTWGLAETSTCPLCPAHGSLEHILSCCPKALGEGRYTWRHNQVLKAVADTICTAIRESKHQVPARYNISFVRAGEKPQGERKASTGLLATARDWKLHVDLGRQLKLPEHIARTSLRPDLVLTSDSTKQVVLVELTVPWEDRMEEAFERKKAKYLELVEACRGRGWRARCEPIEVGCRGFLSQSVHRAFRLLGIRGLRERRATKNISEVAEKASSWLWIKRGEVWSSALLGHKPGPDQPRLGRPGEGV

SEQ ID NO: 32775 - protein, 1075 aa, Oryzias melastigma
MGCLKGGRVKQRTEAVACTSEVRVIDPGQTEEEPGPELPHSARNLRAALVPLQIGKPEHHRVKWPAANNKEWHQFDEDVDKIMEITSTGNADQKLRAMCTIIMSIGAERFGVKEKTSSKPARPNRREHKISQLRQELKTLKRKFRTAKVEEKSALSELRVFLRRKLITLRRAEQHRRKGKERAKKRKAFISNPFGFTKRLLGQKKSGNLSCPVEEINQYLNVVFSDPSRDQDLGPCKALIKPPEPVVQFNTSEPTLKEVKEAVLAARSSSSPGPSGVPYRVYKQCPKLLVRLWRLIKVIWRRGRVADQWRSAEGVWIPKEEEASNIDQFRIISLLCVEGKVFFKIMSQRLMEFLLKNGYIDTSVQKGGVPGVPGCLEHTGVVSQLIREARESRGDLATLWLDLTNAYGSIPHKLVETALKRHHVPETITSLLMDYYNNFQLRVTSGASTSAWQRLEKGIITGCTISVPLFSLAMNMIVKSAEVECRGPMSRSGTRQPPIRAFMDDLTVTATSVPGCRWLLQGLERLISWARMSFKPAKSRSLVLKKGRVADNFRFTIGGTPIPTVTENPVKSLGKVFNSSLRDTIALQQTREDLTTWLVAIDKSGLPGKFKTWMYQHGVLPRLLWPLLIYEVPMSTVETLERTISQFLRRWLGLPRSLSSIALYGHSTMLQLPISGLSEEFKVTRARELMMYRDSSDKKVSSAGIRVKTGRKWKAQEAVNRAEARLQHSVLVGNIAVGRAGLGRFVKPSYNKARGRERRQMVQDEIRAEVEEERRIKMVAMYQQGAWTKWEHVEERRITWSELWRCEPQHIKFLIQSVYDVLPSPTNLQRWGLSDTALCQLCQKRGTLEHILSSCSKALVEGRYRWRHDQVLRALADTVSAAITNCKYQHTSKQFITFVRAGEKTWQQPSPTGGLLTTARDWKLQVDLGRQLKFPEHIATTALRPDMVLTSQSSKQVVLIELTVPWEDRMEEANERKRAKYAELVAECRSNGWKARCEPVEVGSRGFAGQSLPRTLKLLGVKGQLCRRAIKNIIEAAEKASRWLWIRRGDPWSSGPLGHKSRADHPWLGRPSEGV

SEQ ID NO: 32776 - protein, 928 aa, Corydoras sp.
MAAKEEERVALSELRQILRRKLVTLRRAEWHRKNGKERAKKRKAFITNPFTFTKRLLGQKKSGNLKCPVEEINQHLNITFSDPSREQDLGPCEALVKPPEPTVQFNTTEPTLKEVKEAVMAARSSSTPGPSGVPYRVYKQCPKLLVRLWKIMKVIWRRGKVATQWRSAEGVWIPKEEEASNIEQFRIISLLCVEGKIFFKIVSQRLTDFLLKNGYIDTSVQKGGVPGVSGCLEHTGVVSQLIRDARESRGDLATLWLDLTNAYGSIPHKVVETALTKHHVPVSITNLILDYYNNFQLRVTSGSLTSAWQRLEKGIITGCTISVPLFSLAMNMIVKSAEVECRGPLSRSGTRQPPIRAFMDDLTVTATSVPGCRWLLQGLERLISWARMSFKPAKSRSLVLKKGRVADRYRFAIGETPIPTVTEKPVKSLGKVFNSSMRDSEVLQKTKVELTSWLTAIDKSGLPGKFKAWMYQHGVLPRLLWPLLVYEVPISTVEMLERNISQFLRRWLGLPRSLSSIALYGHSTMLQLPFSGLSEEFKVTRTRELMLYRDSSDRKVATAGIRVKTGRKWKAQEAVDRAEARLQHNILVGNIAVGRAGLGCFSKPRYDKVRGREKRQMVQDEIRAEVEEDRRVKMVAMHQQGAWTRWEHAEQRKVTWPELWRLEPLHIKFLIQSVYDVLPSPTNLKCWGLADTAACQLCQKRATLEHILSCCPKALGEGRYRWRHDQVLRALADTLSSAISNCRYQHTPKHTITFVRAGEKAQHQSGSSGGLLTTARDWKLQVDLGRQLKFPEYIVASALRPDMLLISESTKQVVLVELTVPWEDRIEEANERKRAKYAELVTECRSKGWKARCEPVEVGCRGFVGQSLPRTLKVLGVKGQLCKRAIRNIIEAAEKASRWLWIRRGDPWSSGPLGHKSGADHPRLGRPR

SEQ ID NO: 32777 - protein, 1173 aa, Corydoras sp.
MNRVVTTGESVDSTERRHPGQQGLAPLAAVPVKEHPKQATKNPSEPYPQGFPRGGENENPNRTDLLATTFDNVQPTTSTVCICGKVCKNPTGLKIHQTKMACLKGGQVKQRTGVVTSTLDKVLVTDPDQTEEEPGPEYPHSARNLRAAPVLPQSGNPNSRRVKWPATNNKEWLQLDTDIDKIMETTAKGSVDHKLQAMCTLITSIGAERFGVTERLGNRQPVRPNRRELKISQLRQELKILKRQYMAAKEEERVALSEFRQILRRKLVTLRRAEWHRKNGKERAKKRKAFITNPFTFTKRLLGQKKSGNLKCPVEEINQHLNITFSDPSREQDLGPCEALVKPPEPTVQFNTTEPTLKEVKEAVMAARSSSTPGPSGVPYRVYKQCPKLLVRLWKIMKVIWRRGKVATQWRSAEGVWIPKEEEASNIEQFRIISLLCVEGKIFFKIVSQRLTDFLLKNGYIDTSVQKGGVPGVSGCLEHTGVVSQLIRNARESRGDLATLWLDLTNAYGSIPHKLVETALTKHHVPVSITNLILDYYNNFQLRVTSGSLTSAWQRLEKGIITGCTISVPLFSLAMNMIVKSAEVECRGPLSRSGTRQPPIRAFMDDLTVTATSVPGCRWLLQGLERLISWARMSFKPAKSRSLVLKKGRVADRYRFAIGETPIPTVTEKPVKSLGKVFNSSMRDSEVLQKTKVELTSWLTAIDKSGLPGKFKAWMYQHGVLPRLLWPLLVYEVPISTVEMLERNISQFLRRWLGLPRSLSSIALDGHSTMLQLPFSGLSEEFKVTRTRELMMYRDSSDRKVATAGIRVKTGRKWKAQETVDRAEARLQHNILVGNIAVGRAGLGCFSKPRYDKVRGREKRQMVQDEIRAEVEEDRRVKMVAMHQQGAWTRWEHAEQRKVTWPELWRLEPLHIKFLIQSVYDVHPSPTNLKCWGLADTAACQLCQKRATLEHILSCCPKALGEGRYRWRHDQVLRALADTLSSAISNCRYQHTPKHTITFVRAGEKAQHQSGSSGGLLTTARDWKLQVDLGRQLKFPEYIVASALRPDMLLISESTKQVVLVELNVPWEDRIEEANERKRAKYAELVTECRSKGWKARCEPVEVGCRSFVGQSLPRTLKVLGVKGQLCKRAIRNIIEAAEKASRWLWIRRGDPWSSGPLGHKSGADHPRLGRPR

SEQ ID NO: 32778 - protein, 1103 aa, Culter alburnus
MVPDIRNGFSTTTATCFCGKICKNLRGLRIHQAKMGCTRRKQVEQRTEPVLSTDPGETEEEQEPESPHSVQNLHARHATPSKPSEHRRVLWPAANKEAEWRQFDEDVEATLDASCRGEVDQRLQLMSTLIISIGAERFGIKVPKAQNIARPNRRETKISQLRKELKVLNRQYKRASEEEKPALTELRDILRQKLISLRRAERHRRRGRERARKRMAFIANPFGFTKQLLGQKRSGTLRCPKEEINQHLSDKYSDSRREENLPSCRELPTPPEPSFQFNIKEPTLAEVRDIVRTAHTSAAPGPSGVPYKVYKHCPRLLERLWRLIRVVWRRGKVAQQWRHTEGVWIPKEENASDITQFRTISLLSVEGKIFLKILANRLSEYLMRNSYIDTSVQKGGVPGMPGCLEHTEVITQLIREARENRGDLAVLWLDLADAYGSIPHKLVKTALTIHHIPEKITELIRDYYSSFSLRFTSGTVTSAGHRLEKGIITGCTISVVLFALAMSMLVKAAEVECRGPLSRSGIRQPPIRAYMDDLTVTSTSVIGCRWLLRGLERIMAWARMMFKPAKSRSLVLRKGRVEDKHCFYVDGVTIPTVSEKPVKSLGKIFDSTLKDKAAVEAAHMELKTWLSAVDKSGLPGKFKAWIYQHGILPRLLWPLLIYEVPVSLVEGFERNISQYLRRWLGLPKSLSSIALYGHNNKLQLPFTGLTEEFKVTRAREVLLYRDSADTRVSSAGITVRTGRKWQAQEAVDQAEARLRHSVLVGSVAVGRAGLGSHTRPRYDKAQGRERRQMVQREIRAEVEEERLSRTVAMRQQGAWANWNHAAARKITWTELWKSEPARLKFLIQSVYDVLPSPSNLYTWGLVETSTCPLCPAHGSLEHILSCCPKALGEGRYTWRHNQVLKAVADTICTAIRESKHQVPARYNISFVRAGEKPQGERKASTGLLATARDWKLHVDLGRQLKFPEHIARTSLRPDLVLTSDSTKQVVLVELTVPWEDRMEEAFERKKAKYLELVEACRGSGWRARCEPIEVGCRGFLSQSVHRAFRLLGIRGLRERRATKNISEAAEKASRWLWIKRGEVWSSALLGHKPGPDQPRLGRPGEGV

SEQ ID NO: 32779 - protein, 812 aa, Sphaeramia orbicularis
MAARSSSSPGPSGVPYRVYKQCPKLLVRLWKIMKVIWRRGRVATQWRSAEGVWVPKEEGASNIEQFRIISLLCVEGKIFFKIVSRRLTDFLLKNGYIDTSVQKGGVPGVPGCLEHTGVVSQLIREARESRGDLATLWLDLTNAYGSIPHKLVETALTRHHVPVTITNLILDYYNNFQLRVTSGSFTSAWQRLEKGIITGCTISVPLFSLAMNMIVKSAEVECRGPLSRSGTRQPPIRAFMDDLTVMATSVPGCRWLLQGLERLISWARMSFKPTKSRSLVLKKGRVADRFHFTIGGTPIPTMMEKPVKSLGKVFNCSLRDSDTLQQTKAELTSWLTATDKSGLPGKFKTWIYQHGVLPRLLWPLLVYEVPMSIVETLERTISQFLRRWLGLPRSLSSIALYGHSTMLQLPISGLVEVFKVTRARELMMYRDSSDKKVATAGILVKTGRKWKAQEAIDRAEARLQHNILVGNTAVGQAGLGSLPKPRYDKARGREKRQMVQDVIRAEVEEDRRVKMVAMYQQGAWTRWEHAEQRKITWPELWRLEPQHMKFLIQSVYDVLPSPTNLLRWGLADTAAYQLCQKRATLEHILSCCPKALGEGQYRWRHDQVLRALADMLSTALTNCKYQLTPKQSITFVRAGEKAQQQPSSSGGLLTTARDWKLHVDLGRQLKFPENISATLLRPDMVLTSESTKQVVLVELTVPWEDRMEEANERKRAKYAELVTECRRNGWKAHCEPVEVGCRGFAGQSLPRTLKLLGVKGQLCRRAIKSIIEAAEKASRWLWIRRGDPWSSGPLGHKPGTDHPRLGRPSEGV

SEQ ID NO: 32780 - protein, 1101 aa, Branchiostoma floridae
MNAVCVCGKVCKNQRGLRIHQTKMACLRRVQAEHRSGAVATTVEPVLSASAPGQTEEDQGPEAPHSARNLRATPAPPQGRKSDHHRVKWPAANSKEWSQFDEDVDMILESVSRGSTDQKLQSMCTVIMSMGAERFGTIGQRKPTDTMKPNRREVKIRQLRQELKSLRRSFKASTSGEERAALAELTHHLREKLRTLRRAEWHKKKGKERARKRSAFITNPFGFTKRLLGQKRSGNLTCPVEEINLHLSNTFSDASRDVDLGPCPLLVTSPEPEVHFDISEPTLKEVRETVKAARSSSAPGPSGVVYKVYKHCPRLVVRLWRILKVVWRRGKVASDWRQAEGVWIPKEEESSKVDQFRLISLLSVEGKIFFKIVAQRLIKYLLDNQYIDTSVQKGGVPGVPGCLEHTGVVTQLIREAKENRGDLAVLWLDLANAYGSIPHKLVETALTRHHVPESIQNLILDYYSNFWLRAGSSTATSAWQRLEKGIITGCTISVPLFALAMNMIVKGAEAGCRGPVSRSGTRQPPIRAFMDDLTVMTATVPVCRWLLQGLERLITWARMSFKPAKSRSLVLKKGKVAERFRFTLGGTQIPTVSEKPVKSLGKVFNSSLKDIASVQQTRSDLTTWLEGIDKTGLPGSFKAWMFQHGVLPRVLWPLLVYEVPMTMVEQLERTISRFLRKWLGLPRSLSNIALYGRSTKLQLPLSGLTEEFKVTRAREVLMYRDSSDSKVSSAGIHVRTGRKWKAQEAVDQAEARLRHSVLVGSVAVGRAGLGSCPKPRYDKVSGKEKRLLIQDEIRAGEEEDRRCRMVGMRKQGAWTRWEHADSRKVTWPELCRAEPSRIKFLISSVYDVLPSPANLHVWGLAETPSCQLCQRRGTLEHILSSCPKALGEGRYRWRHDQVLRVLADTVSNAIQSSRSQQPPKKSIVFVRAGEKTRQQPTSAGGLLSTARDWQLLVDLGRQLKFPEHIVATSLRPDMVLVSESTRQVVLLELTVPWEERISEANERKRAKYAELVVQSQSNGWRARCVPVEVGCRGFAGQSLAYVLKLLGVRGFRLRKSIRDILEAAEKASRWLWFRRGEPWKPHGHRSGNDQPRLGRPGEGVW

SEQ ID NO: 32781 - protein, 1101 aa, unidentified
MNAVCVCGKVCKNQRGLRIHQTKMACLRRVQAEHRSGAVATTVEPVLSASAPGQTEEDPGPEAPHSARNLRATPAPPQGRKSDHHRVKWPAANSKEWSQFDEDVDMILESVSRGSTDQKLQSMCTVIMSMGAERFGTIGKRNPTDTMKPNRREVKIRQLRQELKSLRRSFKASTSGEERAALAELTHHLREKLRTLRRAEWHKKKGKERARKRSAFITNPFGFTKRLLGQKRSGNLTCPVEEINLHLSNTFSDASRDVDLGPCPLLVTSPEPEVHFDISEPTLKEVRETVKAARSSSAPGPSGVVYKVYKHCPRLVVRLWRILKVVWRRGKVAADWRQAEGVWIPKEEESSKVDQFRLISLLSVEGKIFFKIVAQRLIKYLLDNQYIDTSVQKGGVPGVPGCLEHTGVVTQLIREAKENRGDLAVLWLDLANAYGSIPHKLVETALTRHHVPESIQNLILDYYSNFWLRAGSSTETSAWQRLEKGIITGCTISVPLFALAMNMIVKGAEAGCRGPVSRSGTRQPPIRAFMDDLTVMTATVPVCRWLLQGLERLITWARMSFKPAKSRSLVLKKGKVAERFRFTLGGTQIPTVSEKPVKSLGKVFSSSLKDTASVQQTRSDLTTWLEGIDKTGLPGSFKAWMFQHGVLPRVLWPLLVYEVPMTMVEQLERTISRFLRKWLGLPRSLSNIALYGRSTKLQLPLSGLTEEFKVTCAREVLMYRDSSDSKVSSAGIHVRTGRKWKAQEAVDQAEARLRHSVLVGSVAVGRAGLGSCPKPRYDKVSGKEKRLLIQDEIRAGEEEDRRCRMVGMRKQGAWTRWEHADSRKVTWPELCRAEPSRIKFLISSVYDVLPSPANLHVWGLAETPSCQLCQRRGTLEHILSCCPKALGEGRYRWRHDQVLRVLADTVSNAIQSSRSQQPPKKSIVFIRAGEKTRQQPTSAGGLLSTARDWQLLVDLGRQLKFPEHIVATSLRPDMVLVSESTREVVLLELTVPWEERISEANERKRAKYAELVVQSQSNGWRARCVPVEVGCRGFAGQSLAYVLKLLGVRGFRLRKSIRDILEAAEKASRWLWFRRGEPWKPHGHRSGNDQPRLGRPGEGVW

SEQ ID NO: 32782 - protein, 1090 aa, Leucinodes orbonalis
MNKYLPINKINQIRREVGEELQIHDKKHSNSDVGNSSIQNPDCPEDYTQNHSAPESAEIDKNTDNHTGLYGANEQLDSNLYKGDIELIQKIENEFDAAIKYFINKIPTERPSIPRQKLSKRFHFIVEYLNSNVIPKYIKYDQDFNTIHTIIYCAAYTADICNNTSNKSSIMYQSHRKPHWQRRLENKVNKLRSYIGRLTQYIKGNRNPKVILALEEIKRNYKIHTQYENSNTELEQYLDTLKQKLSAASSRLRRYLACTARKIQNNLFKNNEKAFYRKLENTNTQQSNNTETPDPQELYQYWANIWQNPITHSADSEWIQSINMRNNIPDMKFDFIDAETFIKVVQRAHNWKSPGSDKIHNFWYKYLTVTYPYVQNHMNKFMQNPDSMPDFLLQGITYMIPKDNDTKNPAKYRPITCLQTFYKILTACLSEIIYKHLDDYNILSEAQKGSRKHCQGCKEQLIIDTVAMKQAKTKKRNIHAMYIDYKKAFDSVPHSWLVTVLNIYHIHPSIVSFLKNAMTKWHTVLKLKNPNMTSNPIQIQRGIFQGDALSPLWFCLALNPLSYLLTETQAGFKLMKDDGSHYTLSHLLFMDDIKLFGSEKEELFKLADVTQMFSKDICMNFGIDKCKVFSVNKGKVESNSYALNTGDIIEPLEENNGYKYLGFHQSRQIHYNLIKSDLTNKFTHRLNAILKTELNSKNTVKAINTYAIPLLTYSFGVINWSHTSLKKLQRIINTRLTSHRQHHPKSCIQRLTLSRKLGGRGIIDIINLHNQQVTTLRKYFYERSENSNLHEFVVNSDRKLTPLNLSDANLQKNEYVLDKTTKIQNWTQKSLHGRHISDLNQTHIDKEASNSWLCRGELFPETEGFMIAIQDQVIATRNYRKFITKEPNLPTDSCRQCHSSSETIQHIIGACKTLVNTDYKHRHDQMASIIHQYIAHKYKFLEKEVAYYKYTPAPVLDNTKYKVYWDRSIITDKTIHYNRPDITLHNKEKNIVYLIDIAVPNTHNIQSTINDKLTKYTDLAIQIKVQWKVDTVQIVPIVISSTGVIPKTLHKSLQTLQIPKHKMYLMQKVVILNTCRITRKFLSTSRIATY

SEQ ID NO: 32783 - protein, 1382 aa, Cnaphalocrocis medinalis
MENNNRRYNLRPLPGGYRRGTPGAVAGCSSMRSNGDGGLSRRAPLDKNTTAETKSDRSDYTDNQSLFSSPSRSDYIPSPSPSPSPSCVNSDEIVDVVQDTVHTVEPAPTTLQISKRKRWSKTMNEFILRTYLRITNLDIDNKHYLDTLYTHFTARFPEMDVTKQRLGDQKRAIIRNKLLPQNTIDNIYIEVQRELNNNSPLAQLTTNSQNSQTLSQTSQRIRWTPTHNEHIMRSYLRATRLESDLTAYRQKIHNEFISTFPELSYVTEQRVADQRRLIVINRWIQPDRLSAIRKEVAEELGNNMNEDTQYTTNTRYEEQADSWRPTTQDDERQIAELHYDSISQETLQSSNDTTQNNSVNDLQNETHTNNTQSNTNTSKLADKIDQEFENAFTLFKNTNPTDRPYIPKQKISKTFNFIVQHLNSNTLPKYITIDQDFPTLQTIIYCAAYTAAMCNGTLKFNTANNNNKQNKPNWQIRLEKKVNKLRSYIGRLTQYIQGNRNPRIVAAVEEIKSTYKIHTQYEDLNTELTEYLDTLKQKLSATASRLKRYLTCTNRKKQNGIFSNNEKSFYRQLEQTKSTPITEPPNPLDLHKFWSDIWQNPITHNADAEWIHKLSTEIKAPNMNFEHITAETFIQVVRRTQNWKSPGTDKIHNFWYKKLTCTYPYIHNHINNFIQAPDTMPQYLTQGITYMLSKDASDTINPAKYRPITCLQTFYKILTACLSETIYSHLDEHNILAEEQKGSRKFSQGCKEQLIIDSVAMKQALTRKRNIHTMYIDYRKAFDSVPHSWLISVLELYKIHPSIVKFLQTIMGKWQTVLNIKQSSVTTEPIRIERGIFQGDALSPLWFCLAINPLSKLLNDTKCGFKLKDNNSHFTLSHLLYMDDIKMFGTSKEEIYKLAEVTEEFSKDICMNFGVDKCKIFSVNRGKVQDSNYILENGEIIESLGEENSYKYLGFQQSKQIYHSQTKADLTRKFQRRLDLILKTHLNSRNTIKAINTYAIPLLTYSFGVINWSQTNLKKLQTTINTKLTKHRKHHPNSCSQRLTLPREEGGRGIIDIQNLHNKQIISLRTFFYSKATNSLLHHYTVKIDKKLTPLNLHETNPQKNEQITDSNNKMNNWAQKSLHGRHKADLSQAHIDKAASNKWLVKGELFPETEAFMLAIQDQVIATRNYRKYITKEPNLPTDLCRQCNSASETIQHITSACKVLANTDYKHRHDQVAAVIHQQLACNYKLIEKKTAYYKYKPNPVLENSHCKIYWDRTILTDRTAHFNRPDITVHDKLKNTVYFIDVAIPNTHNIQSTINGKLTKYTDLAIQIKIQWKVDAVQIIPIVLSSTGVVPKTLQKSLDTLDIHHNILNLIQKVAILNTCRITRKFLSTSRITTS

SEQ ID NO: 32784 - protein, 1034 aa, Amphibalanus amphitrite
MRSYEVFEKNLLCCTYFVSVLHFVCTVSAIAYIDDRTDPSATDPHHYDETTLNAPKTVAKNRAKKDRSSGKWKKAVESKLSDGDVKGALRLLSSADAVAQDTSKTIDALRAKHPPAPEDICLPSPPDDTTQPLLASCADVQAAVKSFNTSSSAGLDGLSPSHLQDLTGYTCGEAGRRLITALTRLVNLALSGDIPPAAREVFFTASLLALEKPCGGIRPIAIGSSYRRLATKVAIRPLCSELGEKLRPVQLGFGTTGGCEAAAHATRHFVKLLSEEDVVVKIDMQNAFNSIRRDHFLAVVRDSAPSLYPLLWQAYSSPTPLFHCTAKIMSAAGVQQGDPSGPAVFALATHSIVSSATCSMNTWFLDDGTLGGNRADVYSDLKKLIPAMARVGLQVNPSKCQIIVPTVDNKGGTISQLHHIIPGAPVLSEDQETVLGAPLTAAAAEVSAQDKREDLVRMVGRLKRLDAHSALYLLRNSLWLPKLQYLLRAAPFFQHPALLKQLAEVIRAAMEELVNVRFSDMNWEQAVLPTGLGGLGLRRTEEVALPSFIASLHRCQQLLHTILPASFADKILNELKQAEEEWLVKAGGKMAPADDTRDRQKSWDAPIAEHQRDRLLLEANQFDRARILGAATPESGAWLRALPSSSLGTHLDNETVRIAVALRVGADVCSGVHACRCGSPADVKGHHALTCQFSAGRLPRHTALNDIVRRALSTAGIPAQLEPYGVDRGDGKRPDGMTIYPFSHGRCLVWDATCVNTFADSRLGGAALKSGAAAKKAEDEKRRKYAQLTQRFRFEPVAFETDGACGPTTKAFLQELGAKMAAVSGDQREMEWLWQRLSIAIVRGNAPSVLLECATDPSQQHLSAERPNRESAEQQLATAAGSRRSGCSGGSRLVASQQRWSPPSPKKLEEESRALQLYGGEAHTARELQLTTAADPDKHGNDPLYTGLPNYGNSCYQNATMYVVSHRSLPGNPSDRAGKMLNLLHTRYYEKLLLATLPQMFLTSFLLKKMILQVNRNSGQNFPLPFSIFSQSEL

SEQ ID NO: 32785 - protein, 1211 aa, Cardiocondyla obscurior
MIRHHRTQHNELEIAFECSRCGKRYKTKHPALCHVPKCPGSIIAPVEGHKCEVCNETFTSIIGLSQHKRHRHPAARNRERAASVSSENPDAARPGLVFTTEEITRMYEIEALSTGYTDSQILDKIIIALKRKTRKQLRDKRSEAAYKRRRDAFRKDYNPPLVTTSKTPVTKNRLKEGKTDSATNRRLRTVDGLRDRLRRMSDDNMSAAGASPRDPINRIGSRIPVVLVRCDKLIRGNRATDQDPESDEERELKTQNKGNHKNIESENSLRLISSSKQVQIGCLNPDNVMLAKESSTEQEHCDRREATIMPNDLKTTEELDDNNQTTLNNLILREEWKERIISQLEEWNITSLKETTQKLAENIKEAAGKSHYDLNLLYTKVLTYLGGEDPNSAAISRPKRKRNINKARKIKRYKYARTQELYKKDPGLLAKYVRTNKDYCVKNNSELNRSEVKDLYTQLWGTISNVRLKDLNTVENKNQDAVDELAVLGPVTIDEVWGRLSKIKKSTAPGPDGIKRTMLTGLEKGQILSALYNLILITGTLPNEWYCNRTTLIPKEGKDTSKATNYRPLTISSLLSRLFWGIIDQRIRGKIKINPRQKGFVAEAGCFANVLLLSEIVRKMKNKDGGVGIQLDVSKAFDTVPHEAISWALERKGLPPAMIELIVRSYDGVSTVIAHPKGQIEIKLRRGVKQGDPLSPLLFNLILEQLLEELEQLPGYEDGEFKISSMAFADDIFLVASDTHKAQALLDHVVEYLGALGMSIAASKSYAFQIQRTRDSWFVLDPNVERLGEKLPCVPPDSYLQYLGIQFSPWSGIKEMEKEELTGTLRRLKTLPLKPDQKLQLLQTYLIPHYLHQLVLAVPAKTRLEGMDRDIRTIVRGMLHLPMCVADGLIHSNQKDGGLGIPRLAQLVPRVALSLGLKMSISSDKILQYISGNVAAIERLRRAANGIRLNFPYTKTDLINYKKRCAIKELKDWKALSSQGRSVDAHIGDKIGNKFLRERQLLKPCRFITALQLRTNTAGNKTSINKAFPQKDLRCRKCKTVNKTLAHILGNCTHTKTARIRRHDEIKNFIENSVLQKDAEATITTEATFTGTSGERLKPDLVIKNRKGVLVVDVTVRCEDGEYLAQAREEKINKYRSLLPQAQKLFPTDKINHTEVLPVVIGTTGAMPQDTIDSLKVVGIKNQKDLLTISLIALRSSIELYHTFMDYDGPA

SEQ ID NO: 32786 - protein, 1160 aa, Nephila pilipes
MHCPYKNCSASFGTKAWYLTNSSIKKHLNVFHKTPPKSVEFWCFCCRKKISKNPSKHSCLKNHLVLPRQPVNDEDEWSRSICKNFTTASKLGRLNHLAAHKKEDFKNKAPGLIIPPPAKQSRKAFRKKVQNLAEGDPGSLSLAPLLANTSNHDDPPAPEDVIPSDDEDEEIQKIDIPEVSLLSPFLEPLDALLEVDDLADALPKFESIVEGVVESVREFFHLTPPTTERPSTTISKKRVFDPQNAQEVQKLYRWNRRRCVRNITQPQSTPCSIRKDALFSSFQKIWGLPEETFELHTESPPERPPILENLDPEFVLECLQSSENSAPGTDKITYKQWREVDPRCVTLTKIFNVCLKLHDVPTSWKISKTILIHKSGDLDDIANWRPIALSNTIYKLFMECLTRKTQDWCSLHQVLSPSQKGFTPFDGVIEHNFLLAQHLETARRNHSDSFVAWLDVSNAFGSVPHSVIFQALKNIGVDADFISLIQNVYMGSCTSIISDEGLTDPIPILRGVKQGCPLSGILFNIAINHVLVEVQKDQPTHCILAFADDLVLLSNSSDQLQLLIDQVVVQLQLSGFQFNLKKCATLHLSGRTPVGSRPTVFCVNKQPVQPLEEAEFYKYLGKPIGLNIMPDFSHTNEALRHASEISKSKLAPWQKLDALKTFFCPSLCFAMRTAQLQKKDWKQIDSALTKEVKDLLYLPLNASRSYLHGESKLGGCGLPSAAHDSDCYLVDTAFKLLTSSDTEVTSNALGQLSRSIRHRLHRNPSDGDFASYLTGSMEDEFSTTTNAVSNIWTRARAASRRLGVTWSFSDGSPSLTVGEVVIIASLRKRVMKILHHLFRIDHSDILVQSRSQGKTMECVGLHQSSSHFIATGDYTRFADWGFVHKARLNLVQLNANKKWKGAGFDTRCRRCGEYEETLPHVINHCWAYAAGIQNRHNAILDRVEKAVAFKGKVLSKNKAVEKTGLRPDLIATLGNKLFIVDVTIPFDNRRNSFEAARLLKHAKYAPLLNYFSEKGFSSVEIVPIVVGSLGSWDPKNDSFLKKFCSNRYLKVFRKLCVSDSIRWSRDIYIQHLTGKKQYNLPGPDSNDPLDFADDEAEDQNVNSLNFLFFLLTYCPILFFVFFLCSFLLPLSFHQFSTLSDKFDFRDFLVSNFGPCVASLK

SEQ ID NO: 32787 - protein, 2000 aa, Nephila pilipes
MRFCSPDHLPLSDLFLNLNFNLFLCPLLQFVPLKIFVLEKDLSTTKLIMSQNETNVDSQSTSKKSPTPIALRTRQSGIELTFRDAALAGKCKICPASFGSTERLRVHVLNHKPNHKRKKALQAIQDVSRLPQWYSSTTTPASSAPVKRTSLFEQYRHMFPSLVSSESQSASIQDMHSQSELLTTPTTPLIVPSSSCPSDICSTVDTVVTPLPSILSTSLPDDFSYPICLPTSLHSPPDLVNTGNSPVTLVANNKSSPSDSHSPTLASTLVDCLPVSSAPEHPLSPTVLVVPAPHQDSPPSQISPDVAPSLPPNALIQPPVPSSIVHLVASPHIHVATMSPKEETPAIPVLFTPSNADFSATSDIPSKEELLSFDPKPKRISPTVSMRPSSPSILDILLSNTQDKEDISLLATPPDSSPSNVNQSEAQSTLFNSLPVEVKEHFKNVVTTGHPTKTAFSKPTYAQKARFTLERCPFCEKKFYTKTACSSHIESIHKPQQIINKNSNKNDSAPPPTTEVSSSLEDFAPAPNQRQIIKKNDKFIPKSKTTSLFPVVPPYEFFCHICVEYFSTDLTKAQHYKIAHNITLKNVSHQYKTKEVKIPAASPPSKTIVNSSLKKKKVPVPHVEDHQPVYIPVTQQPLGSYPLLDPKSISPQKTPMPSIERTITSQNIPAVNIGSSQKITPPADPKQKNHPPPKSSVQTKKDKSPPSKSKNKSDSSQEQRISNSSPPKKCSLCSFVAIKAVGLRLHYYRSHGVRQPAIASASQSDLISSDRVHPSVRIFENSSLIANQSKPCLSISASQESITDDQPAYLNNSNPLIFENSSLPAHKKMLPSTNIEEKTSADLSARNENNTLPPSDSTDAQVFLPFANHPDRLHHPSHPYVSFKQNVLKYCFPLPFKMHCPYKNCSASFGTKAWYLTNSSIKKHLNVFHRTPPKSVEFWCFCCRKKISKNPSKHTCLKNHLVLPRQPVNDEDEWSCSICQNFTTASKLGRQNHLAAHKKEDLKNKAPGLIIPPPAKQSRKNFRKKVQNLAEGDPGSLPLAPLLANSTGHDDPPAPEDIITSDNEDEETEKIDIPEVSLLSPFLEPLDALLEVDDLTDALSKFESIVEGVVESVREFFHLTPPTTEKPSTTTPKKRVFNPQNAQEVQKLYRWNRRRCVRNITQPQSTPCSIRKDALFSSFQKIWSLPEETFELHPESPPERPPILENLDPEFVRECLQSSENSAPGTDKITYKQWREVDPRCITLTKIFNVCLKLHDVPTSWKISKTILIHKSGDPEDIANWRPIALSNTIYKLFMKCLTRKTQDWCSLHQVLSPSQKGFTPFDGVIEHNFLLAQHLETARRNHSDSFVAWLDISNAFGSVPHSVIFQALKNIGVDEDFISLIKNVYSGSCTSIISEEGLTDPIPILRGVKQGCPLSGILFNIAINHVLIEIQKDQPSHCILAFADDLVVLSNSSDQLQLLIDQVVVQLQLSGFQFNLKKCATLHLSGRTPVGARPTVFCVNKEPVQPLEEAEFYKYLGKPIGLNILPDFSHTNEALRHASEISKSKLAPWQKLDALKTFFCPSLCFAMRTAQLQKKDWKQIDSALTKEVKDLLYLPLNASRSYLHGESKLGGCGLPSAAHDSDCYLVDTAFKLLTSSDTEVTSNALGQLSRSIRHRLHRNPSDGDFASYLTGSMEDEFGTTTNAVSNIWTRARAASRRLGVTWSFSDGSPSLTVGEVVITASLRKKVMKILHHLFRIDHSDILVQSRSQGKSMECVGLHQSSSHFISTGDYTRFADWRFVHKARLNLVPLNANKKWKGAGFDTRCRRCGEYEETLPHVINHCWAYAAGIQNRHNAILDRVEKAVAFKGKVLSKNKAVENTGLRPDLIATLGNKLFIVDVTIPFDNRRNSFEAARQIKHAKYAPLLNYFSEKGFSSVEIVPIVVGSLGSWDPKNDSFLKKFCSNRYLKLFRKLCVSDSIRWSRDIYIQHLTGKQQFNVPGADSNDPLDFADDEAEDQDVNL

SEQ ID NO: 32788 - protein, 1943 aa, Nephila pilipes
MSNPDSTDTSSPSGTKTIDCDRQTISSTPVALRTRLCSQLSYDSAAQIGQCKLCPASFSSPSRLRVHLLNHKPNAKRKKALLALDILFGLPKSSMSKNLKAQSQCIPSNTIMDTPILPTLSQPLPTSLFPEDVCPDISSPITEISNLQTETLPKENSNLDLVLPPFAQEFRSSQLVVQDVLLSLINSVTSMIDRTENLTLQLSSSHSSCSFQNSPIPLQTASAIPLTSTPDVAAPVVDSPLISPVLRTSAAENDCSTPIQLSLHSTELLPAAFPSSPNTIVCSSQSNNSLSDKPKVVNSSPTVIDKSPNDDSKNSILASDLALSSSDQSEKSSDILDLILSQSSPRLDIEDECQIDQGAPCIPEINSQNSSKSPPGNEINKFNSSQNLLPSKKSSYFDALNENFCKICNLYITDNLEKHINNHSPSKGRTKSRAALKKIRMTPTNTTTTAIPSTSSRTEIEDTFRERFPELKVFNKSSSSSDKSSPDHDFLVSWLKTPPTGPPTITSFPKRQYSLVVKKGLFRCEFCEKAFITKQGVDSHYESVHGVKQKRIMAKLFPPGRQDICHFCCHSPKGSQTLADHYRLIHNLEVHSDRKSDSTNTINVSPQNFVCNQPKTRNVSQDFSTVTITPSPSQPVDVQVNITNAEIHPVPDASSEDPSSRICSECGFVAYKMGGLKLHYFKAHHIKKFKQNRKTSPQDPEVIDIIPSTSESLNGDPNLVEKPALHDLPLKKSSSLKDNSSKLPDISKQIKKKVSFQQQNKIFINQNFSSSSQSDFVPHRVFHNSNLQNNSTTTSNSSLKSDSSEAPNSLNSSDRHNHLQYPYVSFQNNVLKYCFPVPLKINCPLPNCSSSFGTKAWFLTNSSIKKHLNIFHKSPATSVEFYCFHCKNKIKKNPSQHPCLKGRLIIPKQATDNDSEWTCPICQDFTTASRIGQQNHLASHKRERIRKDSTPLIIPETNASRKLKKRKKISSLSDGAPGDTRIAPSLNSINQDFISNKEPEDVFPSDDEDEDSGPKIDLPQPSVLSSFLDPLDALIEVDDLSDAITSFENLMGGIVEAVQEHFHLSPQRSSTLKNENKKQFDPMNAQEVQKLYKWNRRRCVRNIACPSNNRCSISKNTLQKYFSETWGAPNKEFMLEAIEKKERPCVLDSLDPEFVLSCLQSCENSAPGLDLITYRQWREVDPRCMVLSKIFNICLKLKDVPKTWKMSNCVLIHKKDDLNLIENWRPISLSNTIYKLFAKCLTRKLQDWCSFNQVLSPAQKGFTPYDGVIEHNFLLAQFIENAKRNKSEALLAFLDISNAFGSLPHEVLFKALEQAGVEFEFTTLIRNIYLGSNTCVLTEEGPTDPIPILRGVKQGCPLSGLLFNIAINHILVDVQGDNDSRKILAFADDLVLLSKSTDDLQKQIDKVASLLQKIGLALNPRKCATLHISGLTPVGTRDSSFNIENQDIKTIVEAQFYKYLGKPVGFNIATDFTHTNEAVKLAHEIAASKLAPWQKLDAFKCFFLPSLNFAMRTAQLQKNDWSKIDSALSKEVKDLLYLPKHASLSYLYGETKLGSCGIPSAAEDSDFYLVDTAFKLLTSLDEEVTSNALGQLSRSVRFRIKREPTDGDFASFLSGSMEDQFKITTNAGNNVWTRARAASRRLGITWSFSDGSPSLTVSEVILTRSDRRRVLKVLHHLSRMDHSSKLIETRSQGKAMDCVGLHQASSHFLADGAYTRFADWRFIHKARLNLVPLNGNKKWKGAGFDTRCRRCGQFDETLPHVLNHCWSYSEAIQRRHNAILDRVEKVVAYKGKIISKNRAVEKTGLRPDLVASKGNKLFIIDITIPFENRRQSFEAARKIKHHKYAPLLQYFSDKGFDSVEIVPIVVGSLGSWDPRNDKFLKEFCSNSYLKLLRKLCVSDCIKWSRDIYIQHLTGKKQYLVPGADVKDPLDFAADEAMDENVNL

SEQ ID NO: 32789 - protein, 1036 aa, Nephila pilipes
MFLDDSEWTCSTCNDFSTNSELAKRNHLASHKREQIRSQGTPLIIPESSAQLKRRKRNKVAPLAEGTPGDTRIAPPIVSINQDTMGNCQQDNNALPSDDEDENLSPKIDLPVPSVLSSFLDPLDALIEVDDVSNALETFENLMNGITTAVQDFFHLSPKRSSGNKNITNRKVFDPMNAQEVQKLYKWNRRRCVRHIACPVSNRCPITKTSLHDHFLKTWGAPNQDYILQPGKCHERPPILDSLAPEFVLSCLQTCENSAPGFDQISYRQWREVDSRCLALSKIFNICLKFKDIPKAWKISNCVLIHKKDDLDLIDNWRPIALSNTIYKLFMKCLTRKLQDWCEFNQVLSSAQKGFTPHDGVIEHNFLLAQSLELAKRNKTEIFLAFLDISNAFGSIPHEVIFKVMEREGVDAEFSTMIENIYLGSSTCVLTEEGPTEPIPILRGVKQGCPLSGVLFNLAINHVLVDVQGEQEGHKILAFADDLVLLSNSEEELISQINKVATLLQNIGLALNPNKCATLHLSGKTPVGTRDTQFCIDNQEIKILAEADFYKYLGKPVGFNIAPDFTHTNEAVKLAHDIAVSKLAPWQKLDALKSFFLPSLCFAMRTAQLNKNDWSKIDSALSKEVKELLYLPKHASMSYLYGESKLGGCGIPSAAEDSDFYLVDTKFNLLTSPDEEVTSNALGQLSRSVKFRIHRNPTDGDFASYMSGSMEEDYKVSTNAGSNVWTRARAASRRLGITWSFSDGSPSLTVSEVNITRSDRKRVMKILHHLSRIDHSTKLAATRSQGKAMDCVGLHQASSHFLADGSYTRFADWRFIHKARLNLVPLNGNKKWKGAGFDSRCRRCGEYEETLPHVLNHCWSYSDAIQRRHNSILDRVEKAVAYEAKIISKNRAVEKTGLRPDLIASLGNKLFIVDITIPFENRRQAFVAARKTKHDKYAPLLQYFKDKGFDSVEIIPIVVGSLGSWDPRNDNFLKKFCSNSYLKLMRKLCVSDAIKWSRDIYIQHLTGKKQYNLPGAECNVPLDFADDEAEDQNVNL

SEQ ID NO: 32790 - protein, 1984 aa, Nephila pilipes
MANTTPLNSKTSLSQEPKSSTPIALRTRRCQTQVSFVKAAHLKQCRICPASFPSLQKLKSHVLSHKPNTKRRKALEAIDSLLMAPGLHKTTPTSSQASSGKEPTKLFSKFQQVFPELFRENVSNRNTPCVTSSLKKRGSKIVNIVSTANNSQPDTIGTEIQECVQQLISTIVQSQDTQNTSSPVAASYRELQEDLFLSTSSSSETSPPPSNQEYTPTIDQEIIPPLSATTTPFQINSQAKEENDTQLNPSPHNSSPKPRLYDSEVPVPSQSHLSDQIEILANSSTSNKPPPSPNNLSPECHTLEGEISILDLILSNTQESYQTSTPASTQEILTALTTTATPPQVTPIAQEETHEISTTNNLTPHLPQSLSSNCPSYEGEESVLDLILTNTQEPLEFEDCRIAGTIPKISPLTSPKQPIQSQGNKYTIAASNGQCLLCLKFIDKGTLLQHLYHHKPSPTRAKCLEGFRTSFQPDKLPKRTIATSSPTTITTIEKTFREKFPDLPVFNENSSSSNSSDESILLAKLDSPPTGPPPVSPFKRALYSRVVKKGLFRCQYCEKSFISEAGANRHRQSIHGILPHITRTTLFPDCPPEMCRVCSKGPAPYETIAEHYQYVHNLSISSSIPEDSTTQINVPTIDFVSSAIKHNRNFIQQKPASHSSDLTSKQNTKKAHPSNSNKTCHSAGKPLQNLKIISRPELRGTGTSKLVLLPATKKQNSSDMSTYNEKPPAPSTSKVQAQIVNSSNKPKIHSDRPHPTTKTPQITSNSNTITTIAEIHTNVESSSDEEAQTRICNKCGFVAHKMGGLKLHYFRAHQIKKIPKQKPAILDSQSIRPIPNSPRTINSISSEQQQSHLPGSSKPKTIPKPATKEDKTQEKYVIPEESCKQDGPNQKIHPSAPHDFHINTQEFTNSSRKAPSNTQFHSTGDHLSKITIPPPIDRNHHAQYPYVSFNNNILKYYFPVPLKINCPFNNCSASFGTKAWFLTNSSIKKHLNIFHKCPPSSVEFYCFFCKKKIKKSPALHPCLKNNLIIPKAPIVDDSEWTCEICNTFSTTSRLGKQNHLASHKRDQIRKNAPPLIIPESNAALKRNRRKKVTSLAEGPPGDTRLAPPLLSVNLDRQGKQPVPTIPAQDDEEDDPSTKIDLPIPTVLSSFLDPLDALIEVDDLENAMTAFEKLMDGITTAVQEHFHLPLQSTDPSQKRAGKSRKNFDPMNAQEVQKLYKWNRRRCVRNIACPTSNRCTIAKEALSAHFTSTWGAPNEDFVLHGSTTQDRPPILESLDPEFVFSCLQTSENSAPGADQISYRQWREVDPRCLALSKIFNICLKLKDVPRAWKISNCILIHKKGDQGMIENWRPIALSNTIYKLFMKCLTRKMQDWCSMNQVLSSAQKGFTPHDGVIEHNFLLAQHIENATRQKNESLIAFLDISNAFGSIPHAVIFQAMEREGVDPEFTTMIQNIYLGSTTCVLTEEGPTDPIPLLRGVKQGCPLSGLLFNLAINHILVSIQGEQESHKILAFADDLVLLSHSSEDLQAQIDSVASSLQSIGLALNPHKCATLHLSGKTPVGTRETVFTVETQDIKTLVEADFYKYLGKPVGFNIAPDFTHTNEAVRIAHGITSSKLAPWQKIDALKSFFLPSLCFSMRTAQLQKNDWSTIDSALSKEVKDILYLPKHASLSYLHGDSKLGSCGMSSAAEDSDFYLVDTAFKLLTSPDEEVVSNALGQLSRSIRFRLHRNPTDGDLASYLSGSMEDNYKTTTNAGSNVWTRARAASRRLGITWNFSDGSPSLTVSEVQITRSDRRKVMKILHHLSRASHSSKLVETRSQGKAMECVGLHPASSHFMADGAYTRFADWRFVHKARLNLVPLNANRKWKGAGFDTRCRRCGVQEETLPHVINHCGSYSDAIQRRHNSILDRVETAVAYKGKVLSKNRAVEKTGLRPDLVASLGNKLFIIDVTVPLVHLYLIIANEYSFYSSFHSRRFNKPAHNKVLH

SEQ ID NO: 32791 - protein, 1315 aa, Nephila pilipes
MTTPMLSRPSLQRKILIPKPSEKKKRPVNEATTTAVVHQEQQPPRVAPASVNWLCRLCSFEAINKNGLRLHYFRSHGHRTPPDDRFSPKSGLNGPTAASKKNTSAKNKTTNNPAVKFSNEDIEAIPSTSLEGSSLPSSQGPNRMKSAQSTSTNRPSPPLPLQESRTFVNRNFSTLPVPPLTAPTPKTTPSTNNPSSTPESNMPDRSNDPLYPYASFNRGTLRYCFPVPHQLKCPMMSCKSTFGTKAWYTTNTSIKKHLNTFHKAPPTTVEFWCFFCKRKISKNPAGHPCLKNKLVLPRTAIIDDDDWICHICKNFSASTTLGKQNHLASHNREIIRNTATPLTIPLSTKQRKRNLKKKIQTLAEGDPGSLPLARPVATASNTSADPQPAVDTEEQDLLDVPEITVLSSFCEPLDALLEVDDLENAFPTFEKLVDDITETIREHFHLSLPNERPPATKQKRKVFDSQNAQEVQKLYKWNRRRCVRNIASPSSTTCSIDKDAVYQHFRKIWGPTELEFPFPPEDHPNRPHIIELLDLDTVRTCLQGAENSAPGQDRITYKQWREVDPRCVVLCKIFNICLKFKNVPGTWKTSNTVLIHKKGDPKKMENWRPIALSNTIYKLFAKCITRKLQDWCSLHDVLSPAQKGFTPYDGVIEHNFLLSQHLELARRNGSDSLLAWLDISNAFGSVPHDIIFKALKNIGADDDFIGLVQNIYEGSCSRIITEDGLTEPISILRGVKQGCPLSGILFNVAINHVLLEVQKEQESRCLLAFADDIVLLSHSPEHLQLLIDQVSVMLKQVGLDLNAKKCASLHLSGKRPVGTRQTTFRVFNHPMKILGEAEFYEYLGKPVGFNNPTDFAHTNEAIQLCHDIAASKLAPWQKIDAIKSFYCPSLSFAMRTAQLQKQDWIAIDKAVNKEVKEILYLPSNASCSYLHGESKLGGCGIPSAATDSDFYLVDTAFKLLTSKDPEVVTNALGQLSRSIKHRLKRDPSDGDFASYLSGSMEDSFKSTTNAGSNTWTRARAASRRLGLTWSFSDGSPSITIGDVTITASQRRRVLKILHHLDRMDHSDKLVQTRSQGKAMDCVGLHQASNHFLNEGNYTRFADWRFVHKARLNLVPLNANKKWKGAGFDSRCRRCGEFDETLPHVLNHCMSYSDAIQRRHNAILDRVEKAVSYKGKVLSKNKAIERTGLRPDLVASLGDKLFLIDVTIPFENRRAAFLAARKAKTDKYAPLLGYFKDKGYKSVEVIPIVVGSLGSWDPSNDAFLKKFCTNSYLKLFRKLCVSDSIKWSRDIYIQHLTGKRQYGVSDAVPDEIDDEL

SEQ ID NO: 32792 - protein, 1951 aa, Nephila pilipes
MRCSPDHLLQIDFCVTHNHNFCIPFKCSLNMSDLFSTKNDSPTNSDNLNSAKSKNSCTPVALRTRLCSQLSYEGAAQLGQCKLCPVSFTTPHRLRIHLLSHKPNAKRKKALLAVDISCGLPKSLSSASQPTTSFQPHDAENAITATPTNSTMSQPLPVCLFPETPSSSGSSAMPTGEEKAADSNDTLPTTETCEPVENLSPAAINSSPELGIRDVLMDLISSVTSMMDRSVSISGNTPTPSYKARANKSTDVVYSTPIDSSAPKIPLNTALSPVPQSPTLGKTDPEKPVPHTAPTPPSSPTSSPSCTPVHNPVHTQEILFSTELLPAAFPSPKILDCVPPAPENSAHGEETQLSVLESDLALSTDSARSSEKSPDVLELILSQSSIKLDLDDELPEIQDCTDAPANRKPRDSTPDGNKYTPSKQTAQKAPTITYHQALLKNDGQSRTKHITKGLEMQINSNLPAKKHSKARIVQKKAKPESSSHRDQPPPARSDLENTYREKFPELPVFNNSSSSSTGSSPDYDFLAAQLQAPPSGPPTITSFPRRDYSLVVKKGLFRCELCEKAFVTKAGIDSHYAKTHDVNQKPILPRLFPGGRNDICHFCCHSPKGDQTLADHYRSAHNLEVHSDRSYATSTTIVISPTNCTSTQPKHRDLTANSSTITVTPSSTQVTPVRQKTTDADIHSPPSSRPEDPSLRTCSECGFVARKTGGLKLHYFKIHKLRKIPNKIPTPPAAEEIETLPSCPTISREPVKPTVNTAIQGNKPKQQATLSKVFYNKAQHSTPGITNRGSPELHNSSNNNHNLPVPSTDVQSDSTRTQIPASFINRHNHPQYPYVSFDKNILKYYFPVPLKIKCPYQNCTSSFGTKAWYLTNSSIKKHLNIYHRTPPNAVEFHCYYCKKKISKNPSKHSCLKGNLVIPNTMFLDESEWTCTTCNNFSTGSQIAKRNHLASHKRERIRSQATPLTIPETSAQIKKRKRNKVVPLAEGTPGDTRIAPPLASINQDATINRDIDNNTLPPDGEDDDTSPKIDLPVPSVLSTFLDPLDALIEVDDVSNALETFESLMNGITTSVQEFFHLSPKRSNGDKNTTKRKAFDPMNAQEIQRLYKWNRRRCVRNIACPVSNTCPIPKASLQDHFLKTWGAPNQEYLLQPGDHHERPHILDSLDPEFVASCLRSCENSAPGLDHITYRQWREVDPRCLALSKIFNICLKLKDIPRAWKISNCVLIHKKDDLDRIDNWRPIALSNTIYKLFMKCLTRKLQDWCEFNQVLCSAQKGFTPHDGIIEHNFLLAQSLERAKRNKADIFLAFLDISNAFGSIPHEVIFKVMEREGIDVDFSKLIENIYLGSSTCVLTADGPTEPIPILRGVKQGCPLSGILFNLAINHVLVDVQGGQEGHKVLAFADDLVLLSNSEEELQSQIDKVANLLQNIGLALNPNKCATLHLSGKTPVGTRDTGFTIDDQGIKTLVEADFYRYLGKPVGFNIAPDFAHTNEAVKLAHDIAISKLAPWQKLDAFKSFFLPSLCFAMRTAQLNKNDWSKIDSALSKEVKELLYLPKHASMSYLYGDPKLGACGVPSAAQDSDSYLVDTAFKLLTSPDEEVTSNALGQLSRSVRFRIHRNPTDGDFASFMSGSMEEEYKITTNAGSNVWTRARAASRRLGITWSFSDGSPSLTVSEVNITRSDRKRIMKILHHLSRIDHSSKLAATKSQGKAMDCVGLHQASSHFLADGSYTRFADWRFIHKARLNLVPLNGNKIWKGAGFDSRCRRCGEYEETLPHVINHCWSYADAIQRRHNSILDRVEKAVEYKGNIISKNRAVEKTGLRPDLIASLGNKLYIVDVTIPFENRRQAFEAARKIKHDKYAPLLKYFQDKGYDSVEIVPIVVGSLGSWDPRNDNFLKKFCSNSYLKLMRKLCVSDAIKWSRDIYIQHLTGKKQYTNASEGVGSAPVDGDLDDLD

SEQ ID NO: 32793 - protein, 1520 aa, Nephila pilipes
MTYRQAILKNDGQICNKHITKGLEMQINSNLPSKKRSKARVVQKKAKSESASHRDQPPPARSDLENTYREKFPELPVFNNSSSSSAGSSPDYDCLATQLQAPPTGPPTITSFPRRDYSLMVKKGLFRCELCEKAFVTKAGIDSHYSKTHDIKQKRILPRLFPGGRNDICHFCCHSPKGDQSLADHYRRAHNLEVHSDRPYATSTTINVSPTNFTSTHPKQRGLAANSSQIIVTPSSTQDTQVVQKTINADIHSPPNSRPEDPSLKTCSECGFVAKKTGGLKLHYFKIHKIRKIPNKKPTPPAADEIETLPNCPTTSQEPVKSTVNTAFQVDKPKKQVSLSKVFYNKAQHSTSVIENRGSPELHNSFHNNHKLPVLSTDVQSDSTEIQIPASFIDRHNHPQYPYVSFNKNVLKYYFPVPLKIKCPYQNCSSSFGTKAWYLTNSSIKKHLNIYHRTPPNSVEFHCYFCKKKISKNPSKHSCLKGNLVIPNAMFLDESEWTCTTCNNFSTSSQLAKRNHLASHKRERIRSQATPLTIPETSAQTKKRKRNKVVPLAEGTPGDTRIAPPIASINQDATKNCDNDNNTLPPDGEDDDTSPKIDLPVPSVLSTFLDPLDALIEVDDVSNALETFESLMNGITTSVQEFFHLSPKRSTGNKNATNRKAFDPMNAQEIQRLYKWNRRRCVRNIACPVSNTCPIPKASLHDHFLKTWGAPNQDYLLQPGDHHERPPILDSLDPEFVASCLRSCENSAPGLDHISYRQWREVDPRCLALSKIFNICLKLKDIPKAWKISNCVLIHKKDDLDRIDNWRPIALSNTIYKLFMKCLTRKLQDWCEFNQVLCSAQKGFTPHDGIIEHNFLLAQSLEKAKRNKADIFLAFLDISNAFGSIPHEVIFKVMEREGIEVDFSTMIENIYLGSSTCVLTADGPTEPIPILRGVKQGCPLSGILFNLAINHVLVDVQGGQEGHKVLAFADDLVLLSNSEEELQSQIDKVTNLLQNIGLALNPNKCATLHLSGKTPVGTRDTGFSIDNQGIKTLVEADFYRYLGKPVGFNIAPDFAHTNEAVKLAHDIAISKLAPWQKLDALKSFFLPSLCFVMRTAQLNKNDWSKIDSALSKEVKELLYLPKHASMSYLYGDPKLGACGVPSAAQDSDSYLVDTAFKLLTSPDEEVTSNALGQISRSVRFRIHRNPTDGDFASFMSGSMEEEYKTTTNAGSNVWTRARAASRRLGITWSFSDGSPSLTVSEVNITRSDRKRIMKILHHLSRIDHSSKLAATRSQGKAMDCVGLHQASSHFLADGSYTSFADWRFIHKARLNLVPLNGNKIWKGAGFDSRCRRCGEYKETLPHVLNHCWSYADAIQKRHNSILDRVEKAVEYKGNIISKNRAVEKTGLRPDLIASLGNKLYIVDVTIPFENRRQAFEAARKIKHDKYAPLLKYFQDKGYDSVEIVPIVVGSLGSWDPRNDNFLKKFCSNSYLKLMRKLCVSDAIKWSRDIYIQHLTGKKQYKNASEGVGGAPVDGDLDDLD

SEQ ID NO: 32794 - protein, 1030 aa, Tigriopus japonicus
MSERPGSEGGERAGGNRVERVPSELDDGTCVECSRTFRGKRGLSQHRRRAHPEAYFSGLEALKINALGGRRRWTEEEMKLLAREEVRLLRSGPITPGELLIRLHDRFPDRTVEAIKGRRKHDAYKAVLGAMSEEVGDLRQQNEVTSGDEQERRLKNEYRMAIQEQAAPLVDHQGQVLGLPDISLRFQKFLFGERGPKRHTPRKKPVLVTVAPTKRLSRSVRKHRERGKVLAMYDKAPERTGKNIVKGTGMGGTSATQSPGEEEMYGFWKDIFSKPSKRDERPVEAINPPQWEIASPIGVDEVKSAQKSLKKGAPGKDGLKAVQVKALCAQTLAGYFNSFLYHEDIPSDLKQGSTTLIPKVDTPVGPQEFRPITLSSVVLRLFHSIVASRLGRIEIGHRQKGFQQTDGCGENVWLVKSLVDRSIRRLQPLNIAFCDVRKAFDSVSHQSMIRACHAVGVPGPWTRYLRNAHNGITTVLKCDPLAREIDCTVGVRQGDPVSCHLFNFVMMQTVADVPKEVGIPLEEAGTVSYGMLADDTFLMSETKEGLRMLFEQFEEALRLQGMALNPAKCRTLQIDCWKAKKKWYVPRKAILKSSNGSMVATMSIGETYKYLGVEIGADGVSGEGGSQQLHEQLARLKGCALRPQQKLHILRAVVIPGLYYTQTLAEFCPSRWKDFDRQVRSFVRKVLHLPKDTPLGYYHASHRSGGLAIPSLYTQIGRLRRDRLLKLFDSPDPILKYLCEKDVFLQGERRKHEGEVKVNGVVFPGTKKENDVAWTEVLLASVDGRGLEHHSQSGSYKSFWVIDRASKLSGREYVSAVHVRGSLLKTPSRGARGRQKDSNLCDTCCDQVCNMGHMLQVCPLVLDQRVHRHNEVVKAVSRVGEKRKYEVIHEPRITVGKTFLKPDLIMIGKEKCLVIDPMVLSDNGDLDLANANKATKYQIPEVMDFIYTRHKVQFPSAPAPTIDLSGAVLDWRGCWATTSHTFLQKTLGMSKTELEYVSIRCLLAGRKMWYVATLRRKEKHGRGKRCRKPP

SEQ ID NO: 32795 - protein, 1149 aa, Actinopyga echinites
MTVLNFRELSFYNGMRARCFMLNNCENYNWGLLDTLFTTPTSEVSIPRPNTAVILGPIQVVVPSHTYQCGVCSDLFIDHRSFQRHTYSHETEFQFLCASCMRPFKSAHAVIVHKVHCRGAVPPQNEPSGFTCTVCHSSFGSLRGLGQHERHKHPDLRNRKRIELREKEILKKREARKMANRFSPLQDELPVTTSGESVRGSDDLQKIWSSAEVSLLMDLDSKYKGVRNINVKIAQELRTKTNKQISDKRRQLGLVGSRKPRKNTSAYKSTSTQRVMTRSETTLLGSKIRSAVDTLPNIHEDSNIAHLVQLVEGCPDGFHTFSEAFCETHKPKSKKNNQKRRRRTTLDKKRKRSARKATDFRYVQHQYRNNCKRLASELLDGKSDSDCPISIQEIENTYNNRFGSVSSDDPNLLDYPMPSELCDNDILLQPISNDEIHKALYSFARDTAVGPDGIQVKDLIDIFSNDYSLFTLFNGWLLSGKIPDAYKANRSILIPKGDSNLNDLGNWRPITMSSVVVRLYLKILASRLSQSVKLNPRQRGFIDAAGCLENVSVLEAITKKCKNEGKFLGIALLDLAKAFDTISHKHILCSLERFQVDKHFIDLVADLYTNTTTYFKTALGQTGPIKILKGVKQGDPLSPVLFNIAMDALFAELTAAQGNGFTYETVEIPALAYADDTALISDSFNGLQQSIDIVSRYCDLTGLRLNVNKCVAYKIKPLSSKSFTVNEGNEWVIGANKIPWLSVTDSTKYLGKYFCPWTRSFNPEDLNNVLIKLRKWCSSIQEAPLKPRQRLYLLKTYIIPRIKFKVFMAGPTAAALDTIDQFIRSRIKLWLHLPDCINNDFLYTSCGNGGLGVPSLKFEFITHEIQRREVCLKSSDSCIATLANIFGFVDEIAKIVSTHNIKYDNKKIKNKWWKNRSLYNWEKLPSQGKGVSTFSRNRRHNFWINGNSFLSEKEYIAALQVRTNTYPTRETCSRGRSGTDISCRHCNRAPETLGHITGFCPLFTDNRVARHNRVVNKLVVRARELGFHVIEEPRLQCEGRFFKPDMVIYKDDQSFIIDPTIIWDSSAANLKSEFRKKRSKYLCLIPQIKKITKTASCEVLPVVMGARGSWLKDNNMVSKILNLSNNFVKDLCLRTLAGTLKIVNIFMNI

SEQ ID NO: 32796 - protein, 1165 aa, Actinopyga echinites
MCFAYCTRSGIMMVLKFQELLFINGKGAKYYLLNGVMRCNWGLLSDLFEAPLREVSVSRPPNSPPKGPFMVEVPSNIYQCGACKSAFINHREFQKHTLTHECKFLFKCTSCERMFDSAHAVLIHRTYCKGEAPPRRDPSNFVCSVCHCPFGSSRSLGQHERHRHPEVRNRKRIELREREIRRKREARLQASNRYLHLQDELLDEPSGGSVERQIDRSKIWSDTEVTLLKELDAKFKGAKNINIKIAEFLRSKSNKQISDKRRQLGLTGSVRPSTKPAAKRATTSSQRAQPSSLAPLATKLRSSIDHLPEADSDPSIQPLLSLLDGDPLEFSNWSSSFSDRHKVKSTNNESRNKRRKKRVNLSNRRKKSSKAAADYRYVQDLYQKNRKRLASEILDGKTDSTCPVAIDKIEETYRERFGSADDVEEPDLSVYPPPSEPCDNDILLQPISIEEIQRALFSFARDTAVGPDGLTVDDVIKIFGKDNSLFSLFNGWLFSGKIPDSYKSNRSILIPKGCDNLDDLGNWRPITMSSVVVRLYLKILAARLSNSVKLNPRQRGFIDAAGCLENVTILDSITRSCKREGKYLGVALLDLAKAFDTISHKHILTSLKRFGVSDHFVKLVSDLYTKATTYFKTPLGQTGDINILKGVKQGDPLSPILFNIAMDALFSELTNARGNGFTYSNVEIPALAYADDTALISSSHRGLQRSLDIVVKYCDLTGLRLNVNKCVAYKLTPLSTKSFTVNEGAEWYINNSKVPWLNVTDCTKYLGRYFCPWTRSYNPEDLAKLLTQLGKWCNAIHNASLKPRQKLYFLKTYVIPRIKYKLFMAGPPASALNTIDSFIRTRVKFWLHLPDCVNNDFLYTSCKNGGLGLPSLRFEYITHEIQRRQVCLKSSDNVISQLARLFHLHTEVSNLLESNGITDKPKGVKNKWWRYQALHKWEKLPSQGKGVSTFSRNSRHNFWINGDSWLSEKEFIAALQVRTNTYPTREACSRGRPGSNVLCRHCNRSTETLGHITGYCPLFTDNRIARHNRIVKKLIERAKGLGYTILEEPRLQVQGRFYKPDIVIFKDNESYIIDPTVIWDSSSSILKREFTKKRDKYLCLIPHIKRLTGCDSCHVVPVVLGARGSWFTDNSLVEKILELSNNFIKDLCLRTLTGTLKILNIFMNI

SEQ ID NO: 32797 - protein, 778 aa, Stegodyphus mimosarum
MTPFSPAEVAARLQSCENTAFGPDRLTYQHWRSIDLECTVLSHIFNICLAAKRIPDSWKQSTSILLLKKGNPDSVENWRPIALSPTIAKLFCGCLARRLTSWILLHDILAPSQKGFLPYDGVFENNYVVQQRIQLARRNKSDICLASMDLSNAFGSIPHHAIFTSLSGAGDHFVSLIMSLYTDATTSFITDNGLTDPIPIDSGVRQGCPLSGLFFNIAIDPVLRHVQGSAAEHRILPYADDMLLLAPSPADLQAHIDAAYSISSKIGLSFNARKCFSLHISGLRPIGTRPSTFLVAGTPIRALSNGEGEEFLGKPIGFQLPNDEDALAGYIRNCDAILNSHLAPWQRIDAMKAFILPTMTFDMRTTRLQKTSWTRIDAHARPLLKKTLNLPPEASNDYLYGDSKAACFGVPLAAEDSDIARIDGAFKLLTSKDPAVASLALDDLMSFIAARTKRPPTAADTAAFFSASDEGDFRLSSNPLSSIWSAARNASRRLRVSWDVTDGNLGSISHNGTTLNSTKRHLIFKTLRSAQRKDRASHLQTYPSQGKAIECAAASSMSSCHFFREGSFTRFADWKFIHRARLNLVPLNAVRRRQPGHRGCRRCGYNEETLPHVTCPCMRYSRLYQERHNNIIRIKNAAAQKWTIAAENQAIADTNLRPDLLLTRDRTAIIVDVTVAFDNRLADFESARQAKEEKYAQLAEGLKSQYDDIKIEAIVVGALGSWDPRNDRLIRRICSRQYAKLMKKLIVSDTIRATRDIYIHITGIPQATGNSATGSSHT

SEQ ID NO: 32798 - protein, 1556 aa, Catajapyx aquilonaris
MTRDESTRRVHGSTSQRVNESTGQPVNGSTGHPVDKSAGHRVNVSAGQRVNGPTGPAPLSSTLDYLVPNPLAMPPNRSISTPTSPCGSSSDSDSLVTVSEKSLLSISDGSSAPDPDSVSHPCLLPLPRLDCAHGAADSSDAPHLASVTDSDSSGSCSHPDSPASQVSAGSSLPPLPSVSPTGTLDQGPPTNCKQPVWGHKGTLTIFFPLPCPTLCPELGCDFTSVSRFVGPAKYRLKRHLLNDHGSTIRQTLIRCNRCLRYPGRHPETHECGLVQRAARPTPSCLRDDPHRFNQSTSQRVNQSTNQRDIESTNQRVNGSPSQRVNGSTSQRVDESTSPQVHESSPSLFERRPSSPRSSPPTSQPYGTPLTDWGDDGLQHQHGEPTRMAYARQPERSGNTVKFFFPPPEVILCPESDCDASFRCEPWTAGKNSLKRHLEFTHSLPQPLSPPLKFLCICPLCWKSLPRRPSKHHYECPQQPVAWLQPQAITPYPCPSCALSFPSSTGLRNHLHWHVQRARRDAAGAPPPRCGRSIPACRQQLTVGSCSLQQQDDVSHTLDPPHAPGPRPSPPLPAPLCHPLAQTRDSDTPLPPQLTPPGVVGPASPDPTLSDGEDQPSDAHDDPAEDAASDHSNEVQSNPDDDDNAYTPVDLDDILGTDDRTPVHDHLPTLLRILSGDPSETLWDLFQDTLTDVTSTAAATVKLPPRRTDPQRRRPPIDINDARSIQSLYRRNRRRAVRLILQGESERCAIDKPHLESFFGDAFRERPWDQDFYPTRSERPEVSTNPFTPQEVWNRLRQCENSAPGDDRLTYGHWRGLDPQGVLLTAIFNICLQHRRVPDSWRSSTTVLIYKKGDKTDPANWRPIAIQRTIAKLFSGCLARRLSSWLEKHQVLHKGQKGFRPYDGVLEHNFVVNELIGRTLDQREEVCVGWLDLTAAFTSVPHGALEVALRAAGVGEVVVDVIMNMYVDSTTCILSEEGPTACISIDNGIRQGDPLSSILFNLAIDPILWAVQPGDGGGAHRVLAFADDITLLAGSPDELQHLIDLVAREASRISIEVNAGKTTTLHLSGQTPVGARATSFHLGDQPIPAMMDGDSTTFLGRPVGFQAVPPHGEIEEFIAAGDKILTSLLAPWQRIDALKTFIYSALVFPMRMGTFPKASWERLDKAFKPNILKTLYLPTRATSDYLYGSRRAGACGFPLAAEESDLFRLDSCFKLLTSPDVDVAALAELQLNSTVSARLRRVAGVVDVQQFLSGINDGDFRRNTNRRQNLWTDGRKAATRLGITWSFNNSLPSLTKNDTTVHPVQRRGVVRLLRDTLRRVRDARLHGLPHQGKVLECVAKHPSSSHFLSTGRYTRFADWRFAHRARLGLVPLHGCRPWDATSSTACRRCPEPKETLPHVLDHCMARHSAAYQKRHDAVVERVKRAASAKFNVKKCNQQIFPGSSLRPDLLLTQGADTAIIVDITTPFDNRPESLLAARQHKIDKYAPLALLLGSRYRRVMVEAVVVGALGSWDPMNDRLMRRLCSRSYLRTFRRLCVSDVIRWSRDIYCDHLSGDCQ

SEQ ID NO: 32799 - protein, 1277 aa, Centruroides sculpturatus
MPPTTVLVPLEPPHCCQHCLPIPCEYIDHAGLVRHLKREHGITLQFECRACGLVMEKLKSLKAHQRNAEACRGSIEARPPPPPPPANRRIMRIPLRPRNPNIRRPRTHDATPSTASSDHSSCHSITPSPPASSRRRRATRPAQHTPNDVSPPGDTQVTPSTIGPGVGGNSLAHTQQPARQVLSGLPQHSLDNCSPGTRLHNASCSGLGASTPVPGVPPCSPVPGSSQSPPLALARRPRRRRSNNSHSNTNSPHQDYHEGSLHFTPVSAAVPTAPYCPVDIQPSSPVANASHHPTTEASPRLTTTSPSSTPSWVLSWKDRFDVAVDGDMLENMVDDLVTLAQDICSVAGTTIQPGEQTTSQPSIATDAKRIQRLYRLNKKKAISYITNGQPKYCGINEQELYNHFHRLYARNSQHQPSAPTATPPSIDMDANNPLSGPFTPDEVANRIRRCHNTAPGPDGLRYHHWARVDPQGIILASVFNAALRTSSIPSSWQTSNTILLHKKGSVRNVSNWRPIALSNTLGKIFSACLANRLLTWCKGNNILSNAQKGFLQHEGCLDHNFLLQSIIQDARRKHRSCHIAWLDISNAFGSVPHETIIKCLQWCGIHDESIDIIDNLLRNCTTRIRANSGYTNSIPINSGVKQGCPLSPLLFNLVIETAVRIIQDLQLGYPLEGEHIDILAYADDLVLVSTTAEGLQKQLNYISRWADWAGLRFNPGKCATLSVIGKQHNTSDEVFKLQNADIPPLRAGGTYSYLGIPTGFSTHCTSEDVITNLEADIQQLDESKLAPWQKINAINTMLLPKLTFHLLLGANSKNRLRALDRRIKNCAKKWLNLPQRASAEIVNLPYNHGGANITPCGTLSDICQVTHSMHLFTSRDPRVRSIALNTLRCVVKKRIRRDPTNEDLCTYLNGSMEGEFGIDPADITSNWTRLRMATRRLRKTMDISWNTTDDTVAITTAGNLIPRQAISKLLTGMAKNNLLNRLLRKPDQGKAFQLTAQHPASNHFIKDGLYTSFADWRFIHRARLSVVPLHGLRRFGQSSTKCRNCGFRQETLAHVLNHCGRNLHLATERHNAILNRLRRAINDRDLTVYCNQRVPDYDDNCRPDLVAINDIAKTATIVDVVVPFENGHNAFNAARAKKIEKYSRLTQHYLAKGYDTFCDAFVIGSLGAYDPGNVAVLQRLGIGRKYSKTMAKLMVSDSIRWSREIYIQHLNFGRHAPNHHQRTTAHVNHQHGQQGSTAPQTITSQLPHIGQRSTNIHNQHRRRRPATSQSTRQLRMY

SEQ ID NO: 32800 - protein, 1208 aa, Centruroides sculpturatus
MTRETLLVPLHPPHGCRICLPIPREYSDHAGLVRHLKRKHNTSLVFECRACGLIMDKLKSMKAHQVRSEACKASIEAATPPPPLPTDRVVRRIRIRPRKQYAPRQLRNTTSPVSESDQSTSDHQTPTPPRPRPSRRRTTRSVQAINEEGQQPETPVREQTHLAPTTSCLQPQTYAQALRTSPPTAMTPLTCRDSPPLRASQSLAEVCSSQRARLSPATTCTPPVCPSTAMQAAISPACTPQQSIPGTLIPLPDEDSSSIPSWVTNWKHRFDCAIDGDMLAAMVDDLVALAQDICKISDTTIQPTERSLAHSSIASDAKRIQKLFRANRKKAMSYITSGQPKYCNIEGHILHDHFKEIYAGNSQHRPTAPTVAPLHCDPDTNNPLAGPFTPAEVSARLQRCHNTAPGPDGLRYHHWSRVDPRGTILSSVFNAALRTSYIPPSWQTSNTILLHKKGNENNTSNWRPIALSNTLGKVFSACLANRLLGWCKEHNILSDAQKGFLQHEGCLDHNFLLQSTIQDARRKRRSCHIAWLDIRNAFGSVPHGTIVQCLQWCGLHEESVDIITRLLQNCTTKIRAHNGYTNEIPIRSGVKQGCPLSPLLFNIVIETAVRGIRNLQLGYALEGESIDILAYADDLVLVSSTAEGLQQQLDHISCWANWAGLQFNPAKCATLTVLGKNHDTGDITFHIQGTDIPYLRADESYSYLGIPTGFTTHHTSDIIINNLENDIKQLNNSKLAPWQKIEAVNSILLPRLTFHLLMGSNPKKRLNTLDRLIKNCVKKWLNLPQRASAEVVHLPHDHGRANVTSCNTLSDICQITHGMHLFTSRDPRVSRIATNLLRHVVRKRIRREPTQEDICTYLNGSTEGEFGRDPGDITSTWTRLRTATRRLRKSINIAWDTCDSNIVITSEGNIIPRHATSRALTALAKNALLNRLLRKPDQGKAIKLTAQHPASNHFLRDGRYTSFADWRFIHRARLSVVPLHGLRRFGQLPTKCRNCSHPKETLAHVLNHCAGNLHLATERHNAVLHRLRRAMNDKDLTIYSNQRIPGYNDNCRPDLVAVHEPTKTATIIDVVIPFENGQEAFNHARAAKIEKYASLAHHYRSQGYDTFCDAFVVGSLGAYDPGNTAVLQRLGIKRNYTKLMAKLMISDTIRWSREIYMYHLNHQQPRNQHGRSSSSQHGHSSNQQEVSAHRGQPTSRDYRRQQRRPRQD

SEQ ID NO: 32801 - protein, 1203 aa, Centruroides sculpturatus
MTRETLLVPLHPPHGCRICLPIPREYSDHAGLVRHLKREHNTSLVFECRACGLIMDKLKSMKAHQVRSEACKASIEAATPPPPLPTDRVIRRIRIRSRKQHAPRQSPVSESDQSTSDHQTPTPPRPRPSRRRTTRSVQAINREDQQPETPVREQAHLAPTTSSLQPQTYAQALRTSPPTARTPLTCRDSPPLRARQSPAEVCASQQARLSPAITCTPPVCPPISIQAAISPACAPQQSVSGTPIPLSDEDSSSIPSWVTNWKHRFDCAIDGDMLAAMVDDLVALAQDICKISDTTIQTTERSSAHSTIATDAKRIQRLFRANRKKAMSYITSGQPKYCNIEGHILHDHFKEIYAGNSRHCPTAPTIAPLLCDPDANNPLAGPFTPAEVSARLRRCHNTAPGPDGLRYHHWSRVDPKGIILSSVFNAALRTSFIPPSWQTSNTILLHKKGNENNTSNWRPIALSNTLGKVFSACLANRLLGWCKEHNILSDAQKGFLQHEGCLDHNFLLQSTIQDARRKRRSCHIAWLDIRNAFGSVPHGTIVQCLQWCGLHEESVEIITRLLQNCTTKIRAYNGYTSEIPIRSGVKQGCPLSPLLFNIVIETAVRGIRNLQLGYALEGESIDILAYADDLVLVSSTAEGLQQQLDHISCWANWAGLQFNPAKCATLTVLGKNHDTGDITFQIQGTDIPYLSADESYSYLGIPTGFTTHHTSDNIINDLENDIKQLNNSKLAPWQKIDAVNSILLPRLTFHLLLGSNPKKRLNTLDRLIKNCVKKWLNLPQRASAEVVHLPHDHGGANVTSCNTLSDICQITHGMHLFTSRDPRVSKIATNLLRHVVRKRIRREPTPEDICTYLNGSTEGEFGRDPGDITSTWTRLRTATRRLRKLINIAWDTCDGNIVITSEGNIIPRHATSKALTALAKNALLNRLLRKPDQGKAIKLTAQHPASNHFLRDGRYTSFADWRFIHRARLSVVPLHGLRRFGQLPTKCRNCSHPKETLAHVLNHCARNLHLATERHNAVLHRLRRAMNDNDLTIYSNQCIPGFSDNCRPDLVAIHEPTKTATIIDVVIPFENGQEAFNRARTAKIEKYASLAHHYRSQGYDTFCDAFVVGSLGAYDPGNTAVLQRLGIGRNYTKLMAKLMVSDTIRWSREIYMYHLNHQQPRNQHRRSSSSQHGHPSNQQEVSAHHGQPTSRNHRRQQRRPRQN

SEQ ID NO: 32802 - protein, 1271 aa, Centruroides sculpturatus
MPATTILVPLQPPHHCQLCLPIPREYIDHAGLVRHLKREHDTVLHFECRACGLVMEKLKSLKDYQRRAEACRSSIDACSPPQPPPTDRRIRRIRVRRRNNHHRTLGNQNTTPPTAPTNQSSCSSAMSSPMLDPPSPPTRRVTRSVQQTIDNRTNMGPQHISPIATTTAGSWSTDNSPGGSHSPRDQPPQGSQCYSPAFRPPTTGLDHINGTAPVYSDVAARGASPPTSPMANQPPAINRRPRRRRPSVVRDNGRHRSPPQGRSGSYNSLVVDSPAHHIPTSDQPPLQPMCTSQHSTTLPSTADPSAIPSWVLNWKHRFEVATDGDMLEAMVEDLVILAQNIYSASETTIQPREHTPSYSSIPSDARRIQRLYRLNRKKAIDCITKGQPSYCHIDGQELYSHFKRSYAHNSQHHPSAPSATPPCTDLDSNNSLTSPFTPAEVATRIRRCHNTAPGPDGLRYHHWARVDPKGIILSSVFNAVLRTSFIPPSWQRSNTILLHKKGDVRSVSNWRPIALSNTLGKIFNACLANRLLLWCQSNDILSSAQKGFLQHEGCLDHNFLLQTIIQDARRKHRSCHIAWLDISNAFGSVPHNTISQCLQWCKLHEESTDIITSLLQNCSTRIRTSNGYTDDIPIHSGVKQGCPLSPLLFNIVIETAVRSIQCLQLGYPLEGEPIDILAYADDLVLISPTAEGLQKQLDCITNWAAWAGLRFNAGKCASLSVKGKQHGTGNEIFNLQGTNIPPLSAGGSYDYLGIPTGFSTHHTSEDVISNLEKDIQQLDESKLAPWQKIHAINTMLLPKLTFHLLLGSNPKKRLRTLDRHINNCAKRWLNLPQRASAEVIHLPYDHGGANITPCGTLADICQITHGTHLFTSRDHKVRSIAIKSLQSVVWKRIRRDPSLEDLCTYLNGSMEGEFGADPADISSSWSRLRSATRRLRKQLDITWTVFDDTIAITTTGNIIPRQSVTKILTNMAKNVLLNRLLRKPDQGKAFKLTAQHPASNHFIRSGLYTSFADWRFIHRARLSVVPLHGLRRFGQLPTRCRHCGFQQETLAHVVNHCTRNLHLATERHNAVLNRLRRAVNDEDLTIKCNQRIPGFEGNCRPDLVAINDNAKTATIIDVVIPFENGHNAFNSAREKKIEKYTPLAQHFRNMGYDTYCDAFVVGSLGAYDPGNIAVLQRLGIGRKYSKTMAKLMVSDCIRWSREIYVQHLNYGRSAPSHQRPATNAHNQHRRRRTTTNRHTPDRRDQHATRLHDQRDSPRHPDSNYRSYNHTD

SEQ ID NO: 32803 - protein, 1275 aa, Centruroides sculpturatus
MPTTTILVPLQPPHHCQLCLPIPREYIDHAGLVRHLKREHDTVLHFECRACGLVMEKLKSLKAHQRRAEACRSSIDACSPPQPPPTDRRIRRIRVRRRNSHHRTLGSQNTTPPTAPTNQSSCSSAMSSPTLDPPSPPARRVTRSIQHTIDNRTNMGSQYTSPAAMTNAGPRSTGNSPSGDHLPRAQPPQGSGYYSPTSRPSNPGLGYTNDTAPLYSEIAARGVSPPISPMASQPPAVNRRPRRRQPSDVRDDGHHRSPPQGRSGTSGSYNSRTVDSPAHHISNSDQPPIQPMSTNQHSTSLPSTADPSAIPSWVLNWKHRFEVATDGDMLEAMVEDLVSLAQNICSVSETTIQPRDHTPSYSSIPSDARRIQRLYRLNRKKAIDCITKGQPNYCHIDGQELYTHFKRSYAHNSHHHSSAPSATPPCTDLDSNNPLASPFTPEEVATRIRRCHNTAPGPDGLRYHHWARVDPKGIILSSVFNAVLRTSFIPPSWQRSNTILLHKKGDVRSVSNWRPIALSNTLGKIFSACLANRLLLWCQSNNILSSAQKGFLQHEGCLDHNFLLQTIIQDARRKHRSCHIAWLDISNAFGSVPHDTISQCLQWCKLHEESTDIITSLLQNCSTRIRTSNGYTDDIPIHSGVKQGCPLSPLLFNIVIETAVRNIQHLQLGYPLEGEPIDILAYADDLVLISPTAEGLQKQLDCITNWAAWAGLRFNAGKCASLSVKGKQHGIGNEIFNLQGTNIPPLSASGSYDYLGIPTGFSTHHTPEDVISNLEKDIRQLDESKLAPWQKIHAINTMLLPKLTFHLLLGSNPKKRLRTLDRHIKNCAKRWLNLPQRASAEVIHLPYDHGGANITPCGTLADICQITHGTHLFTSRDHKVRSIAIKSLQSVVRKRIRRDPSLEDLCTYLNGSMEGEFGVDPADISSSWSRLRSATRRLRKHLDITWTVFDDTIAITTTGNIIPRQSVTKILTNMAKNVLLNRLLRKPDQGKAFQLTAQHPASNHFIRSGLYTSFADWRFIHRARLSVVPLHGLRRFGQLPANCRHCGFQQETLAHVINHCARNLHLATERHNAVLNRLRRAVNDEDLTIKCNQRIPGFEGNCRPDLMAINDNAKTATIIDVVIPFENGHNAFNSARDKKIEKYTPLAQHFRNMGYDTYCDAFVVGSLGAYDPGNIAVLQRLGIGRKYSKTMAKLMVSDCIRWSREIYVQHLNYGRSAPSHRRPATNARGQHHRRRTTTNRHTSDHHDQHRTRPHDQRDSPRHLRLQQLQPHGLNP

SEQ ID NO: 32804 - protein, 1272 aa, Centruroides sculpturatus
MPPTTVLVPLEPPHCCQHCLPIPCEYIDHAGLVRHLKREHGITLQFECRACGLVMEKLKSLKAHQRNAEACRGSIEARPPPPPPPANRRIMRIPLRPRNPNIRRPRTHDATPSTASSDHSSCHSITPSPPASSRRRRATRRSRATRPAQHTPNDVSPPRDTQVTPSTIGPGVGGNSLAHTQQPAHQVLSGLPQHSLDNCSPGTRLHNASCSGLGASTPVPGVPPCSPVPGSSQSPPLALARRPRRRRSNNNHSNTNSPHQDYHEGSLHFTPVSAAVPTAPYCPVDIQPSSPVANASHHPTTEASPRLTTTSPSSTPSWVLSWKDRFDVAVDGDMLENMVDDLVTLAQDICSVAGTTIQPGEQTTSQPSIATDAKRIQRLYRLNKKKAISYITNGQPKYCGINEQELYNHFHRLYARNSQHQPSAPTATPPSIDMDANNPLSGPFTPDEVANRIRRCHNTAPGPDGLRYHHWARVDPQGIILASVFNAALRTSSIPSSWQTSNTILLHKKGSVRNVSNWRPIALSNTLGKIFSACLANRLLTWCKGNNILSNAQKGFLQHEGCLDHNFLLQSIIQDARRKHRSCHIAWLDISNAFGSVPHETIIKCLQWCGIHDESIDIIDNLLRNCTTRIRANSGYTNSIPINSGVKQGCPLSPLLFNLVIETAVRIIQDLQLGYPLEGEHIDILAYADDLVLVSTTAEGLQKQLNYISRWADWAGLRFNPGKCATLSVIGKQHNTSDEVFKLQNADIPPLRAGGTYSYLGIPTGFSTHCTSEDVITNLEADIQQLDESKLAPWQKINAINTMLLPKLTFHLLLGANSKNRLRALDRRIKNCAKKWLNLPQRASAEIVNLPYDHGGANITPCGTLSDICQVTHSMHLFTSRDPRVRSIALNTLRCVVKKRIRRDPTNEDLCTYLNGSMEGEFGIDPADITSNWTRLRMATRRLRKTMDISWNTTDDTVAITTAGNLIPRQAVSKLLTGMAKNNLLNRLLRKPDQGKAFQLTAQHPASNHFIKDGLYTSFADWRFIHRARLSVVPLHGLRRFGQSSTKCRHCGFRQETLAHVLNHCGRNLHLATERHNAILNRLRRAINDRDLTVYCNQRVPDYDDNCRPDLVAINDIAKTATIVDVVVPFENGHNAFNAARAKKIEKYSRLAQHYQAKGYDTFCDAFVIGSLGAYDPGNVAVLQRLGIGRKYSKTMAKLMVSDSIRWSREIYIQHLNFGRHAPNHHQRTTAHVSHQHGQQGSTAPQRSTNTHNQHRRRRPATSQSTRQLRMY

SEQ ID NO: 32805 - protein, 1180 aa, Panagrolaimus superbus
MSNTIKKYDLVVPFPYPVPCNLCPEDDRHAYHDHGKLNHHLQTKHDNTKITMFVCKYCRTSAPLIRTINQHLQSKCFYVDADEYATYLAGPVKTRKPLVPLRREPVITRSRSNSFSTPNQVSQPLPQTPVMAMEIHRLNSIIEVNDNPCFLPELSETSSSSSSSATSSPSSKSSFDEQFFDAPQSPFANHFAERIVSSVVNEEPDCWVEPDAWVDTVTNEEPEQINHQPLNINEALEDPLVAFDPTPQNFNSCFNIGTFEKLHDSLIIQLQELQENTKKSQMDRQKDKEQTQDRQNAAPPPRETSATFDAQRSQSPRTAFMQRRSSKKNVNKHSFKSSKYQHTKADYQKLQGLYRVNRKKAFNQIVQDSETKTCEIEENIVVDHFKNVYAKSDRQPTPPPECVPDYPHIDEDDSNPLGTAFTTSEVYEALKKCTNSAPGPDSITYATIKKYDPSASILTAVFNAVKRLKHIPQAWNTSSTILIFKKGDASDIKNWRPIALSNTLSKLYASTIAKRIQSWAIRNKVISSSQKGFMPFEGCLEHSFEIQTIIQHAKRNRKEAVIAWLDLYNAFGNLPHSSLFQTLEMAGLASETIKEIKLLYAKCETTIRLPSGPSESILIESGVKQGCPLSPILFNIAMEPLIRAIENGKAGYTINKVQHSSKTFADDLCSIARGVLYAQRQMNFATSVANWLGIKFNANKCSTLHIRSNKVIKTQFKIQGENMEMMDKETSYNYLGVPTGFKIFPSASETIEQLKREVKAIDKSLLAPWQKFDAINTFITTKLSFHLKCGTVPKKPLNELDALIKKVSKKWLNLPVSATCDLLYLPYNAGGMNIIPTSILADISTVSHAFRLLTSNDRTTQKLALDTMKEVVEKRLKKEPTLDEIAEFYNGASSQNIPLINTDVASCWTKLRGAMRRLSSKMKIVFQPDPDKKKFNLIINKAAATRFAVEAQLRDATRNHFKQSLLSKQSQGRVYNVTAKMPVSNHFYRNGNFTRFTEWNFIHRARLNLVPLNGGTKKWVTKDQSCRKCKYPCETLQHVLNNCKQNLPTMTKRHNAVVDRLMDGFKERKKKSQEILLDEIIPITASTLRPDISIIDKQNKEVILVDVTIPFENLPEAFVKARERKIEKYDSIKKELENQGYNVFLDAFIVGSLGGYDPENYKSMAALNISKRYAILMKKL

SEQ ID NO: 32806 - protein, 1156 aa, Macrostomum lignano
MIGPSDQELSNGALATKEGRVCTPAFCTSTSAPGKINATKSSPEDDSRRCRGTATGASTVAAGGIGCAFGYSGPRSLKCLQCEELVKTENEGREHAKSKHLSESVTIWCCKCNAFNRANLKGVVSHWGSCKGPVAVVAPGAGTSSTADSDPGDAAPHVCKFCERAFTTATGLGLHVQKSHKDEHNKALPTKKIFKYEDAEVKDLARAELTLRTKGRVNIELQKMFPHRTVQSIANLRKSEKYRSFLDEARSELEQTPSVASTTDDEVSTLPETVAEEEHQEMAEEPADAEELILEGIKAAINFFVSKYEFGPDSLKREVARYLKEGLVDSDCWSELEPLLKDAWFIKEEHGQKKAKRKPKSKSLPRLKRTGRAFHRREKYAICQKSLDKDFSGTISKILDGVEISEAEVRPEMAKIEEVYQQRLGNTSGALPENTDTPVVEGLRFERKTAPFDAQEVTRAIRESNKSTAAGPDRWFNGRCLKNLDCETVAALFNLWRFKQKIPSALRENRTILLPKGGDLTDANNWRPLTIGSLLLRLYAKSLTTRWSDAPICERQKAFRPVDGCWENINLLLGALKSAHKKRRQINLISIDLAKAFDNIQHGAIFNAMRRFGFSPSEISVVKDLYTNVWTKISIGNEISGPINISRGVKQGCPLSPFLFNLVLDELINELQSSGYGYPVEGFKVPVLAYADDLILCGATDYETKRMVEITEKFFARQMLAVNLKKCKALRLLPVKGKRTLKVSSDPMLWKGEQLPMVKSIDDFISYLGVKVSVTGKVIWSVDQLRLWLDRVMKAPLKPDQKIKGIKEVLIGRLTYQLRLSEARVCELRRVTRMVRKACKQILHMQLGAPNAWAHLPLRKCGLGLPDFELTIPLMRRAACEKMKSSPDPVVANISEKIPIYESGLTRGLDVRAAKRAIQDKYEQAYLSTQRGKLMNARWISAVKPYWLHGGTGVVKAGEYVSINKLVTRTIETRQFIHPGVTDFETLKCRRCGKAVETDLHVLNECPFTRLAQCRRHNFIADYLGKVLVDHGWEVWRERLVKKDLENFKPDLICRKGAEGAIIDVTVPYESNEAVLQSKERFKEAKYAGLKGQVAELLNINGGVKVVGIAVGALGTILTSTLEKAKGLGLDPVKVGKSLQISALRGSGHVWKAFRS

SEQ ID NO: 32807 - protein, 1156 aa, Macrostomum lignano
MIGPSDQELSNGALATKEGRVCTPAFCTSTSAPGKINATKSSPEDDSRRCRGTATGASTVAAGGIGCAFGYSGPRSLKCLQCEELVKTENEGREHAKSKHLSESVTIWCCKCNAFNRANLKGVVSHWGSCKGPVAVVAPGAGTSSTADSDPGDAAPHVCKFCERAFTTATGLGLHVQKSHKDEHNKALPTKKIFKYEDAEVKDLARAELTLRTKGRVNIELQKMFPHRTVQSIANLRKSEKYRSFLDEARSELEQTPSVASTTDDEVSTLPETVAEEEHQEMAEEPADAEELILEGIKAAINFFVSKYEFGPDSLKREVARYLKEGLVDSDCWSELEPLLKDAWFIKEEHGQKKAKRKPKSKSLPRLKRTGRAFHRREKYAICQKSLDKDFSGTISKILDGVEISEAEVRPEMAKIEEVYQQRLGNTSGALPENTDTPVVEGLRFERKTAPFDAQEVTRAIRESNKSTAAGPDRWFNGRCLKNLDCETVAALFNLWRFKQKIPSALRENRTILLPKGGDLTDANNWRPLTIGSLLLRLYAKSLTTRWSDAPICERQKAFRPVDGCWENINLLLGALKSAHKKRRQINLISIDLAKAFDNIQHGAIFNAMRRFGFSPSEISVVKDLYTNVWTKISIGNEISGPINISRGVKQGCPLSPFLFNLVLDELINELQSSGYGYPVEGFKVPVLAYADDLILCGATDYETKRMVEITEKFFARQMLAVNLKKCKALRLLPVKGKRTLKVSSDPMLWKGEQLPMVKSIDDFISYLGVKVSVTGKVIWSVDQLRLWLDRVMKAPLKPDQKIKGIKEVLIGRLTYQLRLSEARVCELRRVTRMVRKACKQILHMQLGAPNAWAHLPLRKCGLGLPDFELTIPLMRRAACEKMKSSPDPVVANISEKIPTYESGLTRGLDVRAAKRAIQDKYEQAYLSTQRGKLMNARWISAVKPYWLHGGTGVVKAGEYVSINKLVTRTIETRQFIHPGVTDFETLKCRRCGKAVETDLHVLNECPFTRLAQCRRHNFIADYLGKVLVDHGWEVWRERLVKKDLENFKPDLICRKGAEGAIIDVTVPYESNEAVLQSKERFKEAKYAGLKGQVAELLNINGGVKVVGIAVGALGTILTSTLEKAKGLGLDPVKVGKSLQISALRGSGHVWKAFRS

SEQ ID NO: 32808 - protein, 977 aa, Cerceris rybyensis
MPLFPNRTLEAIKGQRKYKKHKDLVAQILNELALERKHNLNDLERPENLNDLERNGQSNDLEQINSSNDLERAVQSNDASGIELLNDLERSKPLVDPPATQVPASQYTELLEAVKNLFDRLDPLSGAQFHADMLNRICANITVWSRDTIFEELEIYLLRTFPPTRGKKRKAKSLSDDIPLSRRQARRVEYAKTQKAWRKSATKCAKIILKSTTNEHPPAKLDMINFWRTTMSNESSTSPGTEHKRPVSPSLWQPVALQEIQGCFPSTTTCPGPDGLTVRLLKAVPAEVLCRIFNLFMLCGRLPRHLLKARTTLIPKKDNASQPGDYRPITVQSILTRSFNKILARRMTERIPLDNRQKAFLPTDGCASNIFDLDMILRYHRQHFKPLYMASIDIAKAFDSVSHNTIRDTLEVMGVPSPMADYVSDSYKRSSTVLSCDGWESEEITPKCGVKQGDPLSPIIFNMVIDRLLRRLPPEVGVKVDNVFFNALAFADDMIFMASTPQGLQIIIDTASDFLASCGLCINASKSFTVALRNVPHLKKSVVDSKAQFTCRSMPMPALKRENEWRYLGVPFTPEGLTVVRPEEELQQALNRLTSAPLKPQQRLFALRVILLPGLYHLLTLGNTTLSRLKRIDTLTRAATRKWLDLPHDTPNAYFHANVKDGGLSIPSMRWLMPLHRRLRLQKFLKPSSPNSGYLRTELQRTVRRLTENRLDIDDAEKLNARWAKILHSSNDGRGLRESSNVPTQHIWITEGNRFLSGKDYLNANKLRINALPTRTRTSHGRVADKRCRAGCNAMETLNHILQQCHRTHKARIERHNAIGSYLLRSLKHKSDTVEAEPHFRTSEGLQKPDYIAISNSNSTATVVDVQVVSERVDLNEAHKTKCDKYKNLEEAIKCRYRTNNISFTTATLNYRGVWSVKSANELVALGILKKDELKVISTRVIVGGLSGFWRFNKTTSVRYNTSPKTGVGSPGQVDSA

SEQ ID NO: 32809 - protein, 977 aa, Cerceris rybyensis
MPLFPNRTLEAIKGQRKYKKHKDLVAQILNELALERKHNLNDLERPENLNDLERNGQSNDLEQINSSNDLERAVQSNDASGIELLNDLERSKPLVDPPATQVPASQYTELLEAVKNLFDRLDPLSGAQFHADMLNRICANITVWSRDTIFEELEIYLLRTFPPTRGKKRKAKSLSDDIPLSRRQARRVEYAKTQKAWRKSATKCAKIILKSTTNEHPPAKLDMINFWRTTMSNESSTSPGTEHKRPVSPSLWQPVALQEIQGCFPSTTTCPGPDGLTVRLLKAVPAEVLCRIFNLFMLCGRLPRHLLKARTTLIPKKDNASQPGDYRPITVQSILTRSFNKILARRMTERIPLDNRQKAFLPTDGCASNIFDLDMILRYHRQHFKPLYMASIDIAKAFDSVSHNTIRDTLEVMGVPSPMADYVSDSYKRSSTVLSCDGWESEEITPKCGVKQGDPLSPIIFNMVIDRLLRRLPPEVGVKVDNVFFNALAFADDMIFMASTPQGLQIIIDTASDFLASCGLCINASKSFTVALRNVPHLKKSVVDSKAQFTCRSMPMPALKRENEWRYLGVPFTPEGLTVVRPEEELQQALNRLTSAPLKPQQRLFALRVILLPGLYHLLTLGNTTLSRLKRIDTLTRAATRKWLDLPHDTPNAYFHANVKDGGLSIPSMRWLMPLHRRLRLQKFLKPSSPNSGYLRTELQRTVRRLTENRLDIDDAEKLNARWAKILHSSNDGRGLRESSNVPTQHIWITEGNRFLSGKDYLNANKLRINALPTRTRTSHGRVADKSCRAGCNAMETLNHILQQCHRTHKARIERHNAIGSYLLRSLKHKSDTVEAEPHFRTSEGLQKPDYIAISNSNSTATVVDVQVVSERVDLNEAHKTKCDKYKNLEEAIKCRYRTNNISFTTATLNYRGVWSVKSANELVALGILKKDELKVISTRVIVGGLSGFWRFNKTTSVRYNTSPKTGVGSPGQVDSA

SEQ ID NO: 32810 - protein, 1102 aa, Adalia bipunctata
MNRCLINAYFRVTEGETKTKKYAANLAERWAEAHPDKQFTGKHLVAQVKNIRVRGLLAPDELEALKQDAIRNSPTNRTANIRRSIHRLSTPMQQGIENDMVQQEEVLIADQACSDILELFQEIDLKWNGVAMESRPTIGKLQHNKEAKTTMSTINTALEQIVIGSTDLKELCHRVYCAATIANIIHGTKTVSPDEQKERKPPWEERIDAKITTFRKEIGVLHAYLGTPTPSKKIKKKIQHYARKLKLKTRDPQYHQKLRTHAESLKQKIAALGNRLRRYHKRTQRYRQNNLFRSNQKEFFRSLEEEHGKPHVNPPTPEEMKEYWSNIWSKNIDHNKEASWIRTERENHDSIGEMGSIIISEADVEATIRRLKNWTAPGVDGIHNFWWKSLKSTHRALARLFQGALNSPKKIPEYFTRGTTHMLPKMGDLTRPQNYRPITCLPSAYKILTSTVGFKINNHLKENNILAWEQNGCRQKGRGSKELLVVDNMITKQAKKKLKNISMAWIDYQKAFDSVPHSWLLQILDIYKVNPQVTRLLQHLMSSWRTSLTMKSKAGSYTTATITIKRGIFQGDGWSPEWFCLALNPLSNMLNRSKYGYIMNETAKLTHLFYIDDLKLYARGRKQLEGELELVRSFSGDIRMSLGLGKCAAVEVKRGKLSEEGNIVMVGGEEISVLGTEARYRYLGIQQTYEVKQPENKKHAETKFMERVHKILRTQLSARNKLEALNIWALPAFTYTAGVIAWSKTDLQKVDRRVRTTLTQYGLLHPKSATERLYLPRKEGGRGLMSLEEACLKEEENIKTFFQRKTNPVHQWVYEVRHPPSASAVTTNESMAEEDRREKLRRNWQTKPLHGRFHAGLHQEEVDLLASNTHLIHGYLYPQTEGTLFAIQDQVVPTRNYIKHITKQPIDSTRCRLCNGAEETVQHLASGCSAIAGTKYLNRHDNMGKVVHQLICLQEGLLKNFVPYHQYTPLALTENPNVKIYWDLTVITDQSVGHNRPDMVVWSKRDKTAVIVDFAVPQDNNLSKSYGEKIAKYEALARQIRDMWQLKTVKIMPLIISANGLVHKKTLIHLKELNLPPNAILWMQKAVILGTVTIIRQILYPH

SEQ ID NO: 32811 - protein, 1106 aa, Adalia bipunctata
MNLSLISAYFQVTEGETKTKKYASQLAERWVETYPEMQFSGKHLVTQMKNIKTRKLISPDEIEAMRNDAKKRSPYRIVENIRRSIQRRSTLTRQRISFDDEDIAMRVSEPELDETNLEILTLFQEINMKWEGVAMESRPRISKLKSNRDTKSTMSTISSALGENIKASKSIDELYHKVYCTATIANIIHHTKPADPKQECRVTSKPPWEERIEKKICVLRKEIGVLHNYLSTQHPSKKVERKVSAYASKIKLKKGDHQYHAQLRAHAEKLKQKIAALGNRLRRYHKRSDRYQQNNSFSNNQRQFFRSLEEEQAEGISPPRQEEMENYWSEIWSKEKKHDLKASWIKTETENHNNLQEMAAVMITEEDIRMTVSRLKNWTTPGIDGIHTFWWKTLTPTHGVLARLFQQALRDPRTVPRYLTHGITHMLPKKGDLSTPQNYRPITCLPSAYKILTSTLSYKINNHLTRNDIMAWEQNGCRRKGRGSKELLVIDNNITKQAKKRLKNISMAWIDYQKAFDSVPHSWLIEVLSIYRVNTQVIELLTSLMSSWRTTLRMKSNISCYQTREIKIKRGIFQGDSLSPLWFCLALNPLSNMLNRSAYGYSINEQAQLTHLFYMDDLKLYARGRKHLEGELELVRKFSADIGMTFGLDKCAAIEVRRGKLVEQGNIRLVDDTELSVMGMEDGYRYLGIQQTYEIRQQENKKLAEEELMRRTRKILGTQLSAKNKMTALNIWAVPSFTYTAGVLSWSKTDLERVDRRIRSTLTKYGMLHPNSAVERLYLPRKEGGRGLSSIEDACKNEKGKITNYFLTRNLPVHRWVAAYRNPSSVSGDHNEEDLAEENRLDQLRRRWQGKPLHGRFHASLQQEEVDLVGSNTYLTQGYLFPQTEGTLFAIQDQVVPTRSYVSKIMKQQIESSKCRLCNSAEESVQHLSSGCSAIANTKYLSRHNNMGKVVHQLMCLKEEMLRHFTPHHQYVPKEIIENDNVKIYWDFTIITDQSVGHNRPDMVVWYKKKRMALIMDFAVPQDYNLQKTYAEKISKYEMLSRQMRDMWHLRQVNIIPLVISVNGLVHKKTTQHLKELNLPPNTIMWMQKAVILGTVNIVRQVVFPH

SEQ ID NO: 32812 - protein, 1135 aa, Harmonia axyridis
MGLNSDDEASDDGETWSRSPRDNVGGTTGNDRHALDSIMVDLPFSQHSCPLCLSEGNGNFLHMALRDTLAHLETKHPNIIPTFICSKCNSKESNNWRSIVGHTARCKGVKVQLGEIQCPECARKFLSKISLGLHMRSKHPVEHNKKLLEGRKRERKKTVGTGWTREEEDELARLEMKYAGNQRKAAQIATELKSKSNKQIRDKLAYNRRRARTITANDSPDDEEVGVTSNMEQQSAGVPPPDLEYLRQSWLASNQEGIMQLLDSVESLSGSSVCAAKISELLRRLLRSKKTISQENIDEVYNIILTRARELATSGDTSVPAASSGTRPCSPKKKKKKSVKKYIYARSQDLYKNSPSTLAKYIVDDVRFHEDNGIQVERDEIKRVYENLWGTPGSLLSVDCFRPVENERAEEIDVGLIGFAEVEARIDGLKDGATGTDGISKVHLKKKEIKLILTLFFGLVTASGVLPSSWGANKTVLLKKKNKSPLLVNSYRPITISSMVERTFWGIVDQRIRSKLTFFCRQKGFVKENGTYTNIHIINELLHKTKTQGGKMIAVFLDLCQAFDRVPHEAIAHALKRRNVSDLTIKLIMDSYASQRTLIKTGGADIPLHVKRGVKQGDPLSPLIFNLIIEPLLVELNKREGIRVGDEWVSCLAFADDLTLLAGNRRMAQRLINIVEKYLHNVGLEISPSKSACFELRATADSSVMEDPELKTGNGERISAICPGEHITYLGAHIKPWGGSDAAEISSELNNCLLRLKKLKLKPHQKIRLLTGYVLPHFMHPLVCQPPGLTKLREMDRAIRVYVKSVLHQQLSRADASLYASCNDGGLGIPRLEWIVTAAALKNGLNFLNSQDPLVKAITLSSKLEERLKRMSMSLRINYPCTIKDVEKFKRSKKKEILQEWKSLTFQGKAVDSFTDDPIGNYWLKNPTVLKSSRYITALKMRTNQVGLRVSMNIAQRQEDIRCRKCKAQPETLGHVIGLCTYTKPQRLRRHDEILTFVMDEIARGDQNLQITKEPSIVVEGKMYKPDLVLISRERVLLVDISVRLEDGAYLEAAKKEKIVKYSPLLKHLCQTYNVAEGKVIPIIVGSRGGMPRSTVQALKYLGVQNFNKLLTISLIALRNSIEIYHSFVDYDGVT

SEQ ID NO: 32813 - protein, 1135 aa, Harmonia axyridis
MGLNSDDEASDDGETWSRSPRDNVGGTTGNDRHALDSIMVDLPFSQHSCPLCLSEGIGNFLHMALRDTLAHLETKHPNIIPTFICSKCNSKESNNWRSIVGHTARCKGVKVQLGEIQCPECARKFLSKISLGLHMRSKHPVEHNKKLLEGRKRERKKTVGTGWTREEEDELARLEMKYAGNQRKAAQIATELKSKSNKQIRDKLAYNRRRARTLTANDSPDDEEVGVTSNMEQQSAGVPPPDLEYLRQSWLASNQEGIMQLLDSVESLSGSSVCAAKISELLRRLLRSKKTISQENIDEVYNIILTRARELAASGDTSVPAASSGTRPCSPKKKKKKSVKKYIYARSQDLYKNSPSTLAKYIVDDVRFHEDNGIQVERDEIKRVYENLWGTPGSLLSVDCFRPVENEGAEEIDVGLIGFAEVEARIDGLKDGATGTDGISKVHLKKKEIKLVLTLFFGLVTASGVLPSSWGANKTVLLKKKNKSPLLVNSYRPITISSMVERTFWGIVDQRIRSKLTFFCRQKGFVKENGTYTNIHIINELLHKTKTQGGKMIAVFLDLCQAFDRVPHEAIAHALKRRNVSDLTIKLIMDSYASQRTLIKTGGADIPLHVKRGVKQGDPLSPLIFNLIIEPLLVELNKREGIRVGDEWVSCLAFADDLTLLAGNRRMAQRLINIVEKYLRNVGLEISPSKSACFELRATADSSVMEDPELKTGNGERISAICPGEHITYLGAHIQPWGGSDAAEISLELNNCLLRLKKLKLKPHQKIRLLTGYVLPHFMHPLVCQPPGLTKLREMDRAIRVYVKSVLHQQLSRADASLYASCNDGGLGIPRLEWIVTAAALKNGLNFLNSQDPLVKAITLSSKLEERLKRMSMSLRINWPCTVKDVEKFKRSKKKEILQEWKSLTFQGKAVDSFTDDPIGNYWLKNPTVLKSSRYITALKMRTNQVGLRVSMNIAQRQEDIRCRKCKAQPETLGHVIGLCTYTKPQRLRRHDEILTFVMDEIARGDQNLQITKEPSIVVEGKMYKPDLVLISRERVLLVDISVRLEDGAYLEAAKKEKIVKYSPLLKHLCQTYNVAEGKVIPIIVGSRGGMPRSTVQALKYLGVQNFNKLLTISLIALRNSIEIYHSFVDYDGVT

SEQ ID NO: 32814 - protein, 1135 aa, Harmonia axyridis
MGLNSDDEASDDGETWSRSPRDNVGGTTGNDRHALDSIMVDLPFSQHSCPLCLSEGNGNFLHMALRDTLAHLETKHPNIIPTFICSKCNSKESNNWRSIVGHTARCKGVKVQLGEIQCPECVRKFLSKISLGLHMRSKHPVEHNKKLLEGRKRERKKTVGTGWTREEEDELARLEMKYAGNQRKAAQIATELKSKSNKQIRDKLAYNRRRARTLTANDSPDDEEVGVTSNIEQQSAGVPPPDLEYLRQSWLASNQEGIMQLLDSVESLSGSSVCAAKISELLRRLLRSKKTISQENIDEVYNIILTRARELAASGDTSVPAASSGTRPCSPKKKKKKSIKKYIYARSQDLYKNSPSTLAKYIVDDVRFHEDNGIQVERDEIKRVYENLWGTPGSLLSVDCFRPVENERAEEIDVGLIGFAEVEARIDGLKDGATGTDGISKVHLKKKEIKLILTLFFGLVTASGVLPSSWGANKTVLLKKKNKSPLLVNSYRPITISSMIERTFWGIVDQRIRSKLTFFCRQKGFVKENGTYTNIHIINELLHKTKTQGGKMIAVFLDLCQAFDRVPHEAIAHALKRRNVSDLTIKLIMDSYASQRTLIKTGGADIPLHVKRGVKQGDPLSPLIFNLIIEPLLVELNKREGIRVGDEWVSCLAFADDLTLLAGNRRMAQRLINIVEKYLHNVGLEISPSKSACFELRATADSSVMEDPELKTGNGERISAICPGEHITYLGAHIKPWGGSDAAEISSELNNCLLRLKKLKLKPHQKIRLLTGYVLPHFMHPLVCQPPGLTKLREMDRAIRVYVKSVLHQQLSRADASLYASCNDGGLGIPRLEWIVTAAALKNGLNFLNSQDPLVKAITLSSKLEERLKRMSMSLRINWPCTIKDVEKFKRSKKKEILQEWKSLTFQGKAVDSFTDDPIGNYWLKNPTVLKSSRYITALKMRTNQVGLRVSMNIAQRQEDIRCRKCKAQPETLGHVIGLCTYTKPQRLRRHDEILTFVMDEIARGDQNLQITKEPSIVVEGKMYKPDLVLISRERVLLVDISVRLEDGAYLEAAKKEKIVKYSPLLKHLCQTYNVAEGKVIPIIVGSRGGMPRSTVQALKYLGVQNFNKLLTISLIALRNSIEIYHSFVDYDGVT

SEQ ID NO: 32815 - protein, 1249 aa, Coremacera marginata
MEQHNQLNEYEIPLPEVVGALPGASAGSDSITRATGDQSLGGALIGSPEETTFQSNSPVNIVSQRTQPVPSVLLGNHPATTNAGLIRQRIKWTLNMNKAVICSYYIATKLGTNLVMYRPLMRQLFLEQFPDLARLTEQNIADRKRAILTRHLLTPQELQDTKIEVEELLNRSEQTTENMSEDNANESEPNTIRLDHVTQRAAEDADGDQLNMNLLQQTAESLAEPPIEMSENNNQRRGITEEQANNVNPEVLRLREQFVITLAEFENTDPCQRDVIPRLYNRTQVERLINIVNTNILPEFLHMVSDFERLHCLIYVAAATVARATGRKTIQMGRNQTTRRTVDKPRWERRIENRIQKLRQDIARLFAFEKTTTKVSKKLKNSVKKIIAPVRVAQLTQNVLNDIKDRKIQELKAYAMRLRRYKASRDRKLQNILFERDQRRFFREIENPASGRRSEGSPTMEDTVDFWRLVWGTDKPYNSEATWIQEEQDKSNEYREMEEINITSNEVSNVIKQCGNWKSPGPDKIHNVWIKKFTAVHELLAKFLNEMMRDPRRTPEFLTLGNTYLIAKGGDTKNPANYRPITCLCTIYKLLTKILSNRIYDHCRANNIITPEQKGCEKNSMGCKDQLTIDAVVVNQAKKKQRNISMGFIDYKKAFDSIPHQYLLRVLELCRIDTKTVELLRHIMTKWKVRLHLEGNTSAPLLIKCGIFQGDALSPLWFCIALNPLSRILGKLKLGFNINVETGPVTINHLLFMDDLKLYTNGKEKMHRMIKIVETFSKDISMEFGIEKCKMVHLRKGVVQNEADNCMVGEGNIISNLTQGENYKYLGLLQLRGISETVVKEKLRTEFERRVVKILKSSLYAGKKTIAINTWALAVFTYSFGIIKWTNTDLDAISTKLRAKMTKFKCHHPNSAIERCMLPREEGGRGLVDIPNHHHNQVTRLREYFRARIQISDLIRAICMADHSYTPLSLRSAQIPKPPNVLTVEERKENWKAKVLNGVHPNQLHQNHIDKAASNLWLKCGKLFPETEGFMVAIQDRVIATRNYRKHIIKENIESEMCRRCSSSMETIDHIIAGCSSLVATHYIKRHNQVAKIAHQRLAVNCKLLTNITPYYKYTPDAVLENSRYKLYWDRSITTDRTTPANRPDIVLFDKVLKIINIYDVAIPLSQNVQTTYSTKLDKYTSLAIEMRRIYEAESVNIAPLVMSATGLVPKTLIQQLKKHHLDEELELMQRAVVLETCNIVRTFLNDYS

SEQ ID NO: 32816 - protein, 1249 aa, Coremacera marginata
MEQHNQLNEYEIPLPEVVGALPGASAGSDSITRATGDQSLGGALIGSPEETTFQSNSPVNIVSQRTQPVPSVLLGNHPATTNAGLIRQRIKWTLNMNKAVICSYYIATKLGTNLVMYRPLMRQLFLEQFPDLARLTEQNIADRKRAILTRHLLTPQELQDTKIEVEELLNRSEQTTENMSEDNANESEPNTIRLDHVTQRAAEDADGDQLNMNLLQQTAESLAEPPIEMSENNNQRRGITEEQANNVNPEVLRLREQFVITLAEFENTDPCQRDVIPRLYNRTQVERLINIVNTNILPEFLHMVSDFERLHCLIYVAAATVARATGRKTIQMGRNQTTRRTVDKPRWERRIENRIQKLRQDIARLFAFEKTTTKVSKKLKNSVKKIIAPVRVAQLTQNVLNDIKDRKIQELKAYAMRLRRYKASRDRKLQNILFERDQRRFFREIENPASGRRSEGSPTMEDTVDFWRLVWGTDKPYNSEATWIQEEQDKSNEYREMEEINITSNEVSNVIKQCGNWKSPGPDKIHNVWIKKFTAVHELLAKFLNEMMRDPRRTPEFLTLGNTYLIAKGGDTKNPANYRPITCLCTIYKLLTKILSNRIYDHCRANNIITPEQKGCEKNSMGCKDQLTIDAVVVNQAKKKQRNISMGFIDYKKAFDSIPHQYLLRVLELCRIDTKTVELLRHIMTKWKVRLHLEGNTSAPLLIKCGIFQGDALSPLWFCIALNPLSRILGKLKLGFNINVETGPVTINHLLFMDDLKLYTNGKEKMHRMIKIVETFSKDISMEFGIEKCKMVHLRKGVVQNEADNCMVGEGNIISNLTQGENYKYLGLLQLRGIRETLVKEKLRTEFERRVVKILKSSLYAGKKTIAINTWALAVFTYSFGIIKWTNTDLDAISTKLRAKMTKFKCHHPNSAIERCMLPREEGGRGLVDIPNHHHNQVTRLREYFRARIQISDLIRAICMADHSYTQLSLRSAQIPKPPNVLTVEERKENWKAKVLNGVHPNQLHQNHIDKAASNLWLKCGKLFPETEGFMVAIQDRVIATRNYRKHIIKENIESEMCRRCSSSMETIDHIIAGCSSLVATHYIKRHNQVAKIAHQRLAVNCKLLTNITPYYKYTPDAVLENSRYKLYWDRSITTDRTTPANRPDIVLFDKVLKIINIYDVAIPLSQNVQTTYSTKLDKYTSLAIEMRRIYEAESVNIAPLVMSATGLVPKTLIQQLKKHHLDEELELMQRAVVLETCNIVRTFLNDYS

SEQ ID NO: 32817 - protein, 1371 aa, Vanessa cardui
MELRSKRSRIMPLPGGDRRGTSGADAGCFSLRTVSSEELNRRTLAGDEPENATAELGECFSPSPCNSPTVTITSNNSSFRFSPMSSSSSSMPLEDVVQPTLSVNKPAPTTNGLKKRRKWSPDINKFILRKYLEITKLETDTKAYLTPLYENFSKMYPDMNDVTRQRLGDQRRAIIQKKLLPQSTIDQIYNQVKTELQSISSTNTQSQYSTLNISTSNNTNRNLKTPTQQARMKWTKEHNEAIIRAYYKITQLESNITAYRQPLHQAFIDTFPHLAHISEQRIADQRRLIFTNNYVSKDKREVIKEEVAQELNTHVNTQIQNPDVQNCSDSTSQTMVHSETTQSNSYIQTPNTQTHITPLVNQRTQTQDTLQIDDIDLRNEMMDGSLEKELLEKLRETLEMYTDIIPEIRPKLPRIKENKELYRLVNIFNKNILHKFVKDDTTISEVHTLIYCTAMVISKQIGYKVRINNDRQHVTPEKQPWQIRLEKDIAALRVDIGRLSQYVRNNRSKKIIREVTLILSKNKVHSSHEGNNITPQDVLDTFKQKLALKSHRLARYLKALKRKQDNKLFITNEKGFYRQLEHSGSKNNNLKNSEIPDTDDLKNYWAELWEKSECHNEEAKWIKEEERKWKGIEEMEFLDLTREDIETVTRKMKNWKAAGLDGVQNFWFKKLTFLHEILAKKCTELIKGEAQLPDFVTKGITHMLPKSEDTSNPSQYRPITCLPTLYKLITSCISNKIKSHIESNNILAEEQKGCRQSHRGCKEQLIIDSTILKQAQKHSKNLHVTYIDYKKAFDSVPHSWLIRVLQIYKVNPTIITFLEDAMTKWKTTLSLSNGTSKIITDEIHICNGIFQGDSLSPLWFCLALNPLSHLLNQSKNGYKLSNSTAITHLMYMDDIKLYGKSDNDMKDLLTITITANFSKDIHMTFGLDKCKTLHIHNGKILKGDYNINNEINITAMDINHTYKYLGIQQNKYINHTQIKKELTSEYLRRVNIICRKKLNSRNLFKALNTYAVPILTYSFAIIKWTNTDISHLQTKTRTSLTKHKYLHPKSAIERMTIKREKGGRGLIDLKILWESQINNLRIFFYSKTESPIHRAVVDIDDKMTPLNLKEKHVTYKLKNITEKEKLDTWRQKQLHGRHIKDLEQQHIDSPASNKWLKLGYLFPETEGFLISIQDQVINTKNYRKHIIKDPSALDDRCRKCHKNPETIQHIINACPLLTQNDYTHRHNQIAYFIHQKLAIKYKLLPPKVEPYYQYTPKAVLESPRFRMYFDRAILTDKTIYCNRPDITVVDKANKTAYLIDIAVPNTHNINQTIADKIHKYSELKEEILRIWNLDKVYIVPLVLSSTGVIPNHLHHSIKLLQLPENTYITMQ

SEQ ID NO: 32818 - protein, 1418 aa, Ostrinia furnacalis
MELRSRKLLRMPLPGGERRGAPGADAGCYSMRSVGGEELSRRALAGIQPEVTTADTIDQESECSSSLSNTPFQSVATSPSDKFASYRSSPTDSTTSSMLLEDVVQKTSLVANSASTSRSLTVRRRWNNSMNEYILRTYLQITRLETDTKGYLPTLHTLFITKFPEMFDVSRQRVGDQRRAIVLKKLLPQTSINKIYEEVRKELEVSQTTQDYNVQAANNKTISSETYASITRKNTQTTDNTSRTRMRWTTEYNEAIIRAYYKITKLETNQTAYRQLLHQSFIEKFPHLAHLSEQRISDQKRLILANNYIQKHRLNIIKQEVAKELEESENQTNEFQSLSIDYSHENINATGLHTQNTVTTSYTIDNSLNLCLSSPNTQQQTYTSQSNLNDSNIQLQTEDQPINQNENSLETQLVNQLQETWTEYAQMDPDTRPKIPKLKESKELYRLVNFFNTNILKNFFDIDSDITHIHTLIYCSAIVISRQLGYIIDVNPPTYKKKFDKPTWQIRLEKDIAVLRQDIGRLSQYINGNRSRKLVTKVEKILKNNSKHSTHENNNRTPQDTLDTLKQKLALKSQRLARYLKALKRKNDNRLFTNNEKGFYRSLSHNSYNITEDNALPAEEELTHYWKDLWEKYQDHNEDAQWVKEEEKRWDGINEMEFLEITREDIEIITGKTKNWKAAGLDGIQNFWYKKMFALHEVLAKRVTNLIKGEEELPLFVTKGITHLLPKGSDTSNPSQYRPITCLTTLYKLITSCITSKINRHIEEHNILAEEQKGCRQNHKGCKEQLTIDQAILKHAHKYNKDLHVTYIDYKKAFDSVPHSWLIRVLQIYKINPTIITFLEDAMTKWKTMLSLSTKNTKISTGEIQIRNGIFQGDSLSPLWFCLALNPLSALLNNSERGYNLTKQTKITHLMYVDDIKLFSDSNEDMRHLVELTANFSDDIHMTFGVEKCKTLHIQKGKIIAGDYNIQEDLNITAMTTEDTYKYLGIKQNRYINHTQIKKDLTGEYIRRVELICRKQLNSKNLFKALNTYAIPILSYSFGVIKWTATDITNLQIKTRTTLTKNKYLHPKSAIERMSIKRYRGGRGLVDLKILWQSQINRLRDFFYTKSNSPIHKAVIESDENFTPLNLLDTNKIYQTSQQAEQEKIETWRRKQLHGRHIHDLEQPHVDTEASNKWLKIGYLFPETEGFLISIQDQVINTKNYRKHIIKDPNSQDDRCRKCHRYPETIQHIINACPLLTQNDYTHRHNQIAHYVHQKLAIKHKLITEKSKPYYQYEPKSVLESPSYKMYFDRAILTDRTIHCNRPDITLVDKVNKIAFLIDVAVPNTHNIKNTISEKIHKYSELKEEIIRIWKLNKVYIVPLVLSSTGVIPNHLLNSLKVIDLHENCYITMQKAAILNTCRIVRRFLQDEPTINVTGGIS

SEQ ID NO: 32819 - protein, 1150 aa, Marasmia exigua
MRWLNEHNETIIRAYFKITKLETDFTTYRQQLHQSFINSFPHLSHISEQRISDQRRLIITNKYIDQDRLNTIKEEVAAELREIDNSSSQSHIPNRDNRMEIAINYVDSLNDNNEHNLAETPIFNTVDIHEETEVEERDGDNKLEKELTEQLHRALEEYSQIDPENRPRLPKLTESKQLYRYVHIFNCQILQNFISADLNIKDIHTLVYCSAIVISKQLGYKIRLNTNNIPTQKNTEKPSWQIRLENDIKTLRADIGRLSQYISSNNRSKKVVAKVKIILCKNKIHSTHENNNSTPQEVLDTLKQKLAIKAHRLARYLKALQRKNDNKLFVTNEKAFYRLINNTGNLITNNLIPSEEELHNYWANLWEKQQDHNEGGKWILDEEKKWNGIEEMKFEDITKEDIETVTRKMKNWKAAGVDGVHNFWYKKYTALHEILAKICTKLITGEEELPAFVTKGITYMLPKGFDTANPSQYRPITCLPTLYKLITSCITCRINRHLESNNILAEEQKGCRQNHKGCKEQLIIDSTVLKHAHKNNRNLHITYIDYKKAFDSVPHSWLIRVLQIYKINPTVITFLENVMENWKTTLSLTTQSSKIITDEIQIRNGIFQGDSLSPLWFCLALNPLSRLLANTNSGYKLTKDTSITHLMYVDDIKLFSKSDNDMRNLIEVTANFSKDIHMTFGLDKCNTLHIIKGKIVAGDYRVDDEINIKAMNSENTYKYLGIKQNKYINHTQIKKELNKEYIRRVNQLCKKRLNSKNLFKALNTYAIPILTYSFGVIKWSCTDIKKIQIKTRTTLTKNKYLHPKSAIERITVKRNKGGRGLVDLKVLWESQINTLRDFFYSKRNSDIHEATIQSDSNFTPLTLQSSNITYQTSQEADRVRFEVWRSKQLHGRHINDIEQSHIDTEASNKWLKIGYLFPETEGFLIAIQDQVICTRNYRKYIIKDPTTHDDRCRRCQKYPETIQHIINACPLLTQTDYTHRHNQVAYYIHQKLAIMHKLISSGVKPYYEYIPKPVLESPTCKMYFDRAILTDKTIHCNRPDITLLNKLNKTAYLIDIAVPNTHNIQKSISEKMLKYSELKEEIRRIWNLQKVYIVPMVLSSTGVIPKHLFKSIDLLGLPESSYITMQKAAILNTCRIVRHFLQEDTNNYLG

SEQ ID NO: 32820 - protein, 1395 aa, Vanessa atalanta
MELRSKRSRIMSLPGGYRRGTSGADAGCFSLRTVSSEKLNRRALAGDKPENATAELGGCYSPSPCNSPTVSITSNNSSFRFSQIPSSTSSMLLEDVVQTTLSVNKPAPTTNGVKKRRKWSPDVNKYILRKYLEITKLETDTKAYLTPLYENFSKMYPDMNDVTRQRLGDQRRAIMQKKLLPQSTIDQIYNQVKMELQNISFTNTQSQNSTLYISSSNNTSRNLKTPTQQTRMKWTKEHNEAIIRAYYKITQLESNITAYRQPLHQAFIDTFPHLAHISEQRIADQRRLILNNNYVSKDKREEIKKEVAHELNSDKYDVNMQSENPSYQNCNYSISQTNVHSETIQSNSPIQTPNTQPQITPFVINQRTQTQHTLQIDYMDQRNEVTDGSLEKELLEKLRETLETFTDISPETRPKLPRLRENKELYKLLNILNQKILHKFLSDDTTVSEVHTLIYCTAMVISKQLGYKVRLNTNDYRQHIKPEKQPWQIRLEKDIAALRVDIGRLSQYIKNNRSKKIVREVALILNKNKVHSSHEGNNITPQDVLDTLKQKLTLKAHRLARYLKALKRKKDNKLFMTNEKGFYRQLELSGRKNNSLEQSEIPDKDDFKNYWADLWEKSECHNERAKWIKEEERKWEGIEEMEFLDLTKEDIEKVTRKMKNWKAAGPDGIQNFWLKKLSFLHEILAKKCTELIKGEAQLPDFVTKGITHMLPKSADTSSPSQYRPITCLPTLYKLITSCISNKINSHIESNNILAEEQKGCRQGHRGCKEQLIIDSTILKQAQKLNRNLHVTYIDYKKAFDSVPHSWLIRVLQIYKVNPTIITFLEDAMAKWKTTLSLSNGTSKIITDEIHICNGIFQGDSLSPLWFCLALNPLSHLLNQFKNGYNLSNSTAITHLMYMDDIKLYGKSEKDMEDLLTITANFSKDIHMTFGLDKCKTLHIHNGNILTGDYNINNTINITAMDINHTYKYLGIQQNKYINHTQIKKELTSEYLRRVNVICRQKLNSRNLFKALNTYAIPILTYSFAIIKWTNTDISHLQIKTRTSLTKHKYLHPKSAIERMTIKREKGGRGLVDLKMLLESQISNLRIFFYSKTESSIHKAVVEIDDKITPLNLKETHVTYKLQNISEKEKLDSWRQKQLHGRHIKDLEQQHIDSVASNKWLKLGYLFPETEGFLISIQDQVINTKNYRKHIIKDPSSLDDRCRKCHKNPETIQHIINACPLLTQNDYTHRHNQIAHYVHQKLAIKYKLLPPKVEPYYQYTAKAVLESPSYRMYFDRAILTDKTIYCNRPDITVVDKTNKTAYLIDIAVPNTHNIKQTIADKIHKYSELKEEILRIWNLDKVYIVPLVLSSTGVIPNHLHHTIKLLQLPENAYITMQKAAILNTCRIVRRFLQDEPT

SEQ ID NO: 32821 - protein, 1061 aa, Vanessa cardui
MVHSETTQSSSYIQTPNTQTHITPLVNQRTQTQDTLQIDNIDLRNEMMDGSLEKELLEKLRETLEMYTDIIPEIRPKLPRIKENKELYRLVNIFNKNILHKFVKDDTTISEVHTLIYCTAMVISKQIGYKVRINNDRQHVTPEKQPWQIRLEKDIAALRVDIGRLSQYVRNNRSKKIIREVTLILSKNKVHSSDKGNNITPQDVLDTLKQKLALKSHRLARYLKALKRKQDNKLFITNEKGFYRQLEHSGSKNNNLKNSEIPDTDDLKNYWAELWEKSECHNEEAKWIKEEERKWEGIEEMEFLDLTREDIETVTRKMKNWKAAGLDGVQNFWFKKLTFLHEILAKKCTELIKGEAQLPDFVTKGITHMLPKSEDTSNPSQYRPITCLPTLYKLITSCISNKIKSHIESNNILAEEQKGCRQSHRGCKEQLIIDSIILKQAQKHSKNLHVTYIDYKKAFDSIPHSWLIRVLQIYKVNPTIIIFLEDAMTKWKTTLSLSNGTSKIITDEIHICNGIFQGDSLSPLWFCLALNPLSHLLNQSKNGYKLSNSTAITHLMYMDDIKLYGKSDNDMKDLLTITANFSKDIHMTFGLDKCKTLHIHNGKILKRDYNINNEINITAMDINHTYKYLGIQQNKYINHTQIKKELTSEYLRRVNIICKKKLNSRNLFKALNTYAVPILTYSFAIIKWTNTDISHLQTKTRTSLTKHKYLHPKSAIERMTIKREKGGRGLIDLKILWESQINNLRIFFYSKTESPIHRAVVDIDDKMTPLNLKEKHVTYKLKNITEKEKLDTWRQKQLHGRHIKDLEQQHIDSPASNKWLKLGYLFPETEGFLISIQDQVINTKNYRKHIIKDPSALDDRCRKCHKNPETIQHIINACPLLTQNDYTHRHNQIAYFIHQKLAIKYKLLPPKVEPYYQYTPKAVLESPRFRMYFDRAILTDKTIYCNRPDITVVDKANKTAYLIDIAVPNTHNIIQTIADKIHKYSELKEEILRIWNLDKVYIVPLVLSSTGVIPNHLHHSIKLLQLPENTYITMQKAAILNTCRIVRRFLQDEPTSNVLPN

SEQ ID NO: 32822 - protein, 820 aa, Vanessa atalanta
MTNEKGFYRQLELSGRKNNSLEQSEIPDKDDFKNYWADLWEKSECHNEKAKWIKEEERKWEGIEEMEFLDLTKEDIEKVTRKMKNWKAAGPDGIQNFWLKKLSFLHEILAKKCTELIKGEAQLPDFVTKGITHMLPKSADTSSPSQYRPITCLPTLYKLITSCISNKINSHIESNNILAEEQKGCRQGHRGCKEQLIIDSTILKQAQKLNRNLHVTYIDYKKAFDSVPHSWLIRVLQIYKVNPTIITFLEDAMAKWKTILSLSNGTSKIITDEIHICNGIFQGDSLSPLWFCLALNPLSHLLNQFKNGYNLSNSTAITHLMYMDDIKLYGKSEKDMEDLLTITANFSKDIHMTFGLDKCKTLHIHNGNILTGDYNINNTINITAMDINHTYKYLGIQQNKYINHTQIKKELTSEYLRRVNVICRQKLNSRNLFKALNTYAVPILTYSFAIIKWTNTDISHLQIKTRTSLTKHKYLHPKSAIERMTIKREKGGRGLVDLKMLLESQISNLRIFFYSKTESSIHKAVVEIDDKITPLNLKETHVTYKLQNISEKEKLDSWRQKQLHGRHIKDLEQQHIDSVASNKWLKLGYLFPETEGFLISIQDQVINTKNYRKHIIKDPSSLDDRCRKCHKNPETIQHIINACPLLTQNDYTHRHNQIAHYVHQKLAIKYKLLPPKVEPYYQYTPKAVLESPSYRMYFDRAILTDKTIYCNRPDITVVDKANKTAYLIDIAVPNTHNIKQTIADKIHKYSELKEEILRIWNLDKVYIVPLVLSSTGVIPNHLHHTIKLLQLPENAYITMQKAAILNTCRIVRRFLQDEPT

SEQ ID NO: 32823 - protein, 1459 aa, Marasmia exigua
METQQKRRYSLRPLPGGYRRGTSGADAGCHSMRTVGGEELNRRALAGNEPETTSAEINSIPTSPTSTYSLFSSIGSSPHSFEDSTSSRSSTTSPTSDVRNTSRPRPGGRRGTSGPGAGRDSMRSARERQTNRRTTAAQNIAGVTEHHSDIISLPRRSLRRLSTLSTKNSMQLEDVVQEAPRVRSPAPTTNGAGMRRRWSQEMNKFILRTYLEITQLETDTKTYLLPLYSKFIENFPEMKDVSRQRIGDQRRAIVKNKLLSQEIIDTIREQVKQDMLNTHKNSQHNKPTYAQITAAKSQTLIIPNQKLTRMRWLNEHNETIIRAYFKITKLETDFTTYRQQLHQSFINSFPHLSHISEQRISDQRRLIITNKYIDQDRLNTIKEEVAAELREIDNSSSQSHIPNRDNRMEIAINYVDSLNDNNEHNLAETPIFNTVDIHEETEVEERDGDNKLEKELTEQLHRALEEYSQIDPENRPRLPKLTESKQLYRYVHIFNCQILQNFISADLNIKDIHTLVYCSAIVISKQLGYKIRLNTNNIPTQKNTEKPSWQIRLENDIKTLRADIGRLSQYISSNNRSKKVVAKVKIILCKNKIHSTHENNNSTPQEVLDTLKQKLAIKAHRLARYLKALQRKNDNKLFVTNEKAFYRLINNTGNLITNNLIPSEEELHNYWANLWEKQQDHNEGGKWILDEEKKWNGIEEMKFEDITKEDIETVTRKMKNWKAAGVDGVHNFWYKKYTALHEILAKICTKLITGEEELPAFVTKGITYMLPKGFDTANPSQYRPITCLPTLYKLITSCITCRINRHLESNNILAEEQKGCRQNHKGCKEQLIIDSTVLKHAHKNNRNLHITYIDYKKAFDSVPHSWLIRVLQIYKINPTVITFLENVMENWKTTLSLTTQSSKIITDEIQIRNGIFQGDSLSPLWFCLALNPLSRLLANTNSGYKLTKDTSITHLMYVDDIKLFSKSDNDMRNLIEVTANFSKDIHMTFGLDKCNTLHIIKGKIVAGDYRVDDEINIKAMNSENTYKYLGIKQNKYINHTQIKKELNKEYIRRVNQLCKKRLNSKNLFKALNTYAIPILTYSFGVIKWSCTDIKKIQIKTRTTLTKNKYLHPKSAIERITVKRNKGGRGLVDLKVLWESQINTLRDFFYSKRNSDIHEATIQSDSNFTPLTLQSSNITYQTSQEADRVRFEVWRSKQLHGRHINDIEQSHIDTEASNKWLKIGYLFPETEGFLIAIQDQVICTRNYRKYIIKDPTTHDDRCRRCQKYPETIQHIINACPLLTQTDYTHRHNQVAYYIHQKLAIMHKLISSGVKPYYEYIPKPVLESPTCKMYFDRAILTDKTIHCNRPDITLLNKLNKTAYLIDIAVPNTHNIQKSISEKMLKYSELKEEIRRIWNLQKVYIVPMVLSSTGVIPKHLFKSIDLLGLPESSYITMQKAAILNTCRIVRHFLQEDTNNYLG

SEQ ID NO: 32824 - protein, 1329 aa, Vanessa cardui
MELRSKRSRIMPLPGGDRRGTSGADAGCFSLRTVSSEELNRRTLAGDEPENATAELGGCFSPSPCNSPTVTITSNNSSFRFSPMSSSSSSMPLEDVVQPTLSVNKPAPTTNGLKKRRKWSPDINKFILRKYLEITKLETDTKAYFTPLYENFSKMYPDMNDVTRQRLGDLRRAIIQKKLLPQSTIDQIYNQVKTELQSISSTNTQSQYSTLNISTSNNTNRNLKTPTQQARMKWTKEHNEAIIRAYYKITQLESNITAYRQPLHQAFIDTFPHLAHISEQRIADQRRLIFTNNYVSKDKREAIKEEVAQELNRHVNTQIQNPDVQNCSDSTSQTMVHSETTQSNSYIQTPNTQTHITPLVNQRTQTQDTLQMDNIDLRNEMMDGSLEKELLEKLRETLEMYTHIIPEIRPKLPRIKENKELYRLVNIFNKNILHKFVKDDTTISEVHTLIYCTAMVISKQIGYRVRINNDRQHVTPEKQPWQIRLEKDIAALRVDIGRLSQYVRNNRSKKIIREVTLILSKNKVHSSHEGNNITPQDVLDTLKQKLALKSHRLARYLKALKRKQDNKLFITNEKGFYRQLEHSGSKNNNLKNSEIPDTDDLKNYWAELWEKSECHNEEAKWIKEEERKWEGIEEMEFLDLTREDIETVTRKMKNWKAAGLDGVQNFWFKKLTFLHEILAKKCTELIKGEAQLPDFVTKGITHMLPKSEDTSNPSQYRPITCLPTLYKLITSCISNKIKLHIESNNILAEVQKGCRQSHRGCKEQLIIDSTILKQAQKHSKNLHVTYIDYKKAFDSVPHSWLIRVLQIYKVNPTIITFLEDAMTKWKTTLSLSNGTSKIITDEIHICNGIFQGVSLSPLWFCLALNPLSHLLNQSKNGYKLSNSTAITHLMYMDDIKLYGKSDNDMKDLLTITANFSKDIHMTFGLDKCKTLHIHNGKILKGDYNINNEINITAMDINHTYKYLGIQQNKYINHTQIKKELTSEYLRRVNIICRKKLNSRNLFKALNTYAVPILTYSFAIIKWTNTDISHLQTKTRTSLTKHKYLHPKSAIERMTIKREKGGRGLIDLKILWESQINNLRIFFYSKTESPIHRAVVDIDDKMTPLNLKEKHVTYKLKNITEKEKLDTWRQKQLHGRHIKDLEQQHIDSPASNKWLKLSYLFPETEGFLISIQDQVINTKNYRKHIIKDPSALDDRCRKCHKNPETIQHIINACPLLTQNDYTHRHNQIAYFIHLKLAIKYKLLPPKVEPYYQYTPKAVLESPRFRMYFDRAILTDKTIYCNRPDITVVDKANKTAYLIDIAVPNTHNINQTIEDKIHKYSELIYLFYFYL

SEQ ID NO: 32825 - protein, 1395 aa, Vanessa cardui
MELRSKRSRIMPLPGGDRRGTSGADAGCFSLRTVSSEELNRRTLAGDEPENATAELGGCFSPSPCNSPTVTITSNNSSFRLSPMSSSSSSMPLEDVVQPTLSVNKPAPTTNGLKKRRKWSPDINKFILRKYLEITKLETDTKAYLTPLYENFSKMYPDMNDVTRQRLGDQRRAIIQKKLLPQSTIDQIYNQVKTELQSISSTNTQSQYSTLNISTSNNTNRNLKTPTQQARMKWTKEHNEAIIRAYYKITQLESNITAYRQPLHQAFIDTFPHLAHISEQRIADQRRLIFTNNYVSKDKREAIKEEVAQELNRHVNTQIQNPDVQNCSDSTSQTMVHSETTQSNSYIQTPNTQTHITPLVNQRTQTQDTLQIDNIDLRNEMMDGSLEKEFLEKLRETLEMYTDIIPEIRPKLPRIKENKELYRLVNIFNKNILHKFVKDDTTISEVHTLIYCTAMVISKQIGYKVRINNDRQHVTPEKQPWQIRLEKDIAALRVDIGRLSQYVRNNRSKKIIREVTLILSKNKVHSSHEGNNITPQDVLDTLKQKLALKSHRLARYLKALKRKQDNKLFITNEKGFYRQLEHSGSKNNNLKNSEIPDTDDLKNYWAELWEKSECHNEEAKWIKEEERKWEGIEEMEFLDLTREDIETVTRKMKNWKAAGLDGVQNFWFKKLTFLHEILAKKCTELIKGEAQLPDFVTKGITHMLPKSEDTSNPSQYRPITCLPTLYKLITSCISNKIKSHIESNNILAEEQKGCRQSHRGCKEQLIIDSTILKQAQKHSKNLHVTYIDYKKAFDSVPHSWLIRVLQIYKVNPTIITFLEDAMTKWKTTLSLSNGTSKIITDEIHICNGIFQGDSLSPLWFCLALNPLSHLLNQSKNGYKLSNSTAITHLMYMDDIKLYGKSDNDMKDLLTITANFSKDIHMTFGLDKCKTLHIHNGKILKGDYNINNEINITAMDINHTYKYLGIQQNKYINHTQIKKELTSEYLRRVNIICRKKLNSRNLFKALNTYAVPILTYSFAIIKWTNTDISHLQTKTRTSLTKHKYLHPKSAIERMTIKREKGGRGLIDLKILWESQINNLRIFFYSKTESPIHRAVVDIDDKMTPLNLKEKHVTYKLKNITEKEKLDTWRQKQLHGRHIKDLEQQHIDSPASNKWLKLGYLFPETEGFLISIQDQVINTKNYRKHIIKDPSALDDRCRKCHKNPETIQHIINACPLLTQNDYTHRHNQIAYFIHQKLAIKYKLLPPKVEPYYQYTPKAVLESPRFRMYFDRAILTDKTIYCNRPDITVVDKANKTAYLIDIAVPNTHNINQTIADKIHKYSELKEEILRIWNLDKVYIVPLVLSSTGVIPNHLHHSIKLLQLPENTYITMQKAAILNTCRIVRRFLQDEPTSNVLPN

SEQ ID NO: 32826 - protein, 1288 aa, Vanessa cardui
MELRSKRSRIMPLPGGDRRGTSGADAGCFSLRTVSSEELNRRTLAGDEPENATAELGGCFSPSPCNSPTVTITSNNSSFRFSPMSSSSSSMPLEDVVQPTLSVNKPAPTTNGLKKRRKWSPDINKFILRKYLEITKLETDTKAYLTPLYENFSKMYPDMNDVTRQRLGDQRRAIIQKKLLPQSTIDQIYNQVKTELQSISSTNIQSQYSTLNISTSNNTNRNLKTPTQQARMKWTKEHNEAIIRAYYKITQLESNITAYRQPLHQAFIDTFPHLAHISEQRIADQRRLIFTNNYVSKDKREAIKEEVAQELNRHVNTQIQNPDVQNCSDSTSQTMVHSETTQSNSYIQTPNTQTHITPLVNQRTQTQDTLQIDNIDLRNEMMDGSLEKELLEKLRETLEMYTDLIPEIRPKLPRIKENKELYRLVNIFNKNILHKFVKDDTTISEVHTLIYCTAMVISKQIGYKVRINNDRQHVTPEKQPWQIRLEKDIAALRVNIGRLSQYVRNNRSKKIIREVTLILSKNKVHSSHEGNNITPQDVLDTLKQKLALKSHRLARYLKALKRKQDNKLFITNEKGFYRQLEHSGSKNNNLKNSEIPDTDDLKNYWAELWEKSECHNEEAKWIKEEERKWEGIEEMEFLDLTREDIETVTRKMKNWKAAGLDGVQNFWFKKLTFLHEILAKKCTELIKGEAQLPDFVTKGITHMLPKSEDTSNPSQYRPITCLPTLYKLITSCISNKIKSHIESNNILAEEQKGCRLSHRGCKEQLIIDSTILKQAQKHSKNLHVTYIDYKKAFDSVPHSWLIRVLQIYKVNPTIITFLEDAMTKWKTTLSLSNGTSKIITDEIHICNGIFQGDSLSPLWFCLALNPLSHLLNQSKNGYKLSNSTAITHLMYMDDIKLYGKSDNDMKDLLTITANFSKDIHMTFGLDKCKTLHIHNGKILKGDYNINNEINITAMDINHTYKYLGIQQNKYINHTQIKKELTSEYLRRVNIICRKKLNSRNLFKALNTYAVPILTYSFAIIKWTNTDLSHLQTKTRTSLTKHKYLHPKSAIERMTIKREKGGRGLIDLKILWESQINNLRIFFYSKTESPIHRAVVDIDDKMTPLNLKEKHVTYKLKNITEKEKLDTWRQKQLHGRHIKDLEQQHIDSPASNKWLKLGYLFPETEGFLISIQDQVINTKNYRKHIIKDPSALDDRCRKCHKNPETIQHIINACPLLTQNDYTHRHNQIAYFIHQKLAIKYKLLPPKVEPYYQYTPKAVLESPRFRMYFDRALLTDKTIYCNRPDITVVG

SEQ ID NO: 32827 - protein, 1312 aa, Vanessa cardui
MSSSSSSMPLEDVVQPTLSVNKPAPTTNGLKKRRKWGPDINKFILRKYLEITKLETDTKAYLTPLYENFSKMYPDMNDVTRQRLGDQRRAIIQKKLLPQSTIDQIYNQVKTELQSISSTNTQSQYSTLNISTSNNTNRNLKTPTQQARMKWTKEHNEAIIRAYYKITQLESNITAYRQPLHQAFIDTFPHLAHISEQRIADQRRLIFTNNYVSKDKREAIKEEVAQELNRHVNTQIQNPDVQNCSDSTSQTMVHSETTQSNSYIQTPNTQTHITPLVNQRTQTQDTLQIDNIDLRNEMMDGSLEKELLEKLRETLEMYTDIIPEIRPKLPRIKENKELYRLVNIFNKNILHKFVKDDTTISEVHTLIYCTAMVISKQIGYKVRINNDRQHVTPEKQPWQIRLEKDIAALRVEIGRLSQYVRNNRSKKIIREVTLILSKNKVHSSHEGNNITPQDVLDTLKQKLALKSHRLARYLKALKRKQDNKLFITNEKGFYRQLEHNGSKNNNLKNSEIPDTDDLKNYWAELWEKSECHNEEAKWIKEEERKWEGIEEMEFLDLTREDIETVTRKMKNWKAAGLDGVQNFWFKKLTFLHEILAKKCTELIKGEAQLPDFVTKGITHMLPKSKDTSNPSQYRPITCLPTLYKLITSCISNKIKSHIESNNILAEEQKGCRQSHRGCKEQLIIDSTILKQAQKYSKNLHVTYIDYKKAFDSVPHSWLIRVLQIYKVNPTIITFLEDVMTKWKTTLSLSNGTSKIITDEIHICNGIFQGDSLSPLWFCLALNPLSHLLNQSKNGYKLSNSTAITHLMYMDDIKLYGKSDNDMKDLLTITANFSKDIHMTFGLDKCKTLHIHNGKILKGDYNINNEINITAMDINHTYKYLGIQQNKYINHTQTKKELTSEYLRRVNIICRKKLNSRNLFKALNTYAVPILTYSFAIIKWTNTDISHLQTKTRTSLTKHKYLHPKSAIERMTIKREKGGRGLIDLKILWESQINNLRIFFYSKTESPIHRAVVDIDDKMTPQNLKEKHVTYKLKNITEKEKLDTWRQKQLHGRHIKDLEQQHIDSPASNKWLKLGYLFPETEGFLISIQDQVINTKNYRKHIIKDPSALDDRCRKCHKNPETIQHIINACPLLTQNDYTHRHNQIAYFIHQKLAIKYKLLPPKVEPYYQYTPKAVLESPRFRMYFDRAILTDKTIYCNRPDITVVDKANKTAYLIDIAVPNTHNINQTIADKIHKYSELKEEILRIWNLDKVYIVPLVLSSTGVIPNHLHHSIKLLQLPENTYITMQKAAILNTCRIVRRFLQDEPTSNVLPN

SEQ ID NO: 32828 - protein, 1231 aa, Vanessa atalanta
MKVYLIIIIIIMQKKLLPQSTIDQIYNQVKMELQNISFTNTQSQNSTLYISSSNNTGRNLKTPTQQTRMKWTKEHNEAIIRAYYKITQLESNITAYRQPLHQAFIDTFPHLAHISEQRIADQRRLILNNNYVSKDKREEIKKEVAHELNSDKYDVNMQSENPSYQNCNYSISQTNVHSETIQSNSPIQTPNTQPQITPFVNQRTQTQHTLQIDYMDQRNEVTDGSLEKELLEKLRETLETFTDISPETRPKLPRLRENKELYKLLNIFNQKILHKFLSDDTTVSEVHTLIYCTAMVISKQLGYKVRLNTNDYRQHIKPEKQPWQIRLEKDIAALRVDIGRLSQYIKNNRSKKIVREVALILNKNKVHSSHEGNNITPQDVLDTLKQKLTLKAHRLARYLKALKRKKDNKLFMTNEKGFYRQLELSGRKNNSLEQSEIPDKDDFKNYWADLWEKSECHNERAKWIKEEERKWEGIEEMEFLDLTKEDIEKVTRKMKNWKAAGPDGIQNFWLKKLSFLHEILAKKCTELIKGEAQLPDFVTKGITHMLPKSADTSSPSQYRPITCLPTLYKLITSCISNKINSHIESNNILAEEQKGCRQGHRGCKEQLIIDSTILKQAQKLNRNLHVTYIDYKKAFDSVPHSWLIRVLQIYKVNPTIITFLEDAMAKWKTTLSLSNGTSKIITDEIHICNGIFQGDSLSPLWFCLALNPLSHLLNQFKNGYNLSNSTAITHLMYMDDIKLYGKSEKDMEDLLTITANFSKDIHMTFGLDKCKTLHIHNGNILTGDYNINNTINITAMDINHTYKYLGIQQNKYINHTQIKKELTSEYLRRVNVICRQKLNSRNLFKALNTYAVPILTYSFAIIKWTNTDISHLQIKTRTSLTKHKYLHPKSAIERMTIKREKGGRGLVDLKMLLESQISNLRIFFYSKTESSIHKAVVEIDDKITPLNLKETHVTYKLQNISEKEKLDSWRQKQLHGRHIKDLEQQHIDSVASNKWLKLGYLFPETEGFLISIQDQVINTKNYRKHIIKDPSSLDDRCRKCHKNPETIQHIINACPLLTQNDYTHRHNQIAHYVHQKLAIKYKLLPPKVEPYYQYTPKAVLESPSYRMYFDRAILTDKTIYCNRPDITVVDKANKTAYLIDIAVPNTHNIKQTIADKIHKYSELKEEILRIWNLDKVYIVPLVLSSTGVIPNHLHHTIKLLQLPENAYITMQKAAILNTCRIVRRFLQDEPT

SEQ ID NO: 32829 - protein, 1222 aa, Marasmia exigua
MVSMAITPHVIEGGPCPSSGDLNNNNNNNKRLIITNKYIDQDRLNTIKEEVAAELREIDNSSSQSHIPNRDNRMEIAINYVDSLNNNNEHILAETPIFNTVDIHEETEVEERDGDNKLEKELTEQLHRAIITNKYIDQDRLNTIKEEVAAELREIDNSSSQSHIPSRDNRMEIAINYVDSLNNNNEHILAETPIFNTVDIHEETEVEERDGDNKLEKELTEQLHRALEEYSQIDPENRPRLPKLTESKQLYRYVHIFNCQILQNFISADLNIKDIHTLVYCSAIVISKQLGYKIRLNTNNIPTQKNSEKPSWQIRLENDIKTLRADIGRLSQYISSNNRSKKVVAKVKIILCKNKIHSTHENNNSTPQEVLDTLKQKLAIKAHRLARYLKALQRKNDNKLFVTNEKAFYRLINNTGNVITNNLIPSEEELHNYWANLWEKQQDHNEGGKWILDEEKKWNGIEEMKFEDITKEDIETVTRKMKNWKAAGVDGVHNFWYKKYTALHEILAKICTKLITGEEELPAFVTKGITYMLPKGFDTANPSQYRPITCLPTLYKLITSCITCRINRHLESNNILAEEQKGCRQNHKGCKEQLIIDSTVLKHAHKNNRNLHITYIDYKKAFDSVPHSWLIRVLQIYKIKPTVITFLENVMENWKTTLSLTTQSSKIITDVIQIRNGIFQGDSLSPLWFCLALNPLSRLLANTNSGYKLTKDTSITHLMYVDDIKLFSKSDNDMRNLIEVTANFSKDIHMTFGLDKCNTLHIIKGKIVAGDYRVDDEINIKAMNSENTYKYLGIKQNKYINHTQIKKELNKEYIRRVNQLCKRRLNSKNLFKALNTYAIPILTYSFGVIKWSCTDIKKIQIKTRTTLTKNKYLHPKSAIERITVKRNKGGRGLVDLKVLWESQINTLRDFFYSKRNSDIHEATIQSDSNFTPLTLQSSNITYQTSQEADRVRFEVWRSKQLHGRHINDIEQSHIDTEASNKWLKIGYLFPETEGFLIAIQDQVICTRNYRKYIIKDPTTHDDRCRRCQKYPETIQHIINACPLLTQTDYTHRHNQVAYYIHQKLAIMHKLISSGVKPYYQYIPKPVLESPTCKMYFDRAILTDKTIHCNRPDITLLDKLNKTAYLIDIAVPNTHNIQKSISEKMLKYSELKEEIRRIWNLQKVYIVPMVLSSTGAIPKHLFKSIDLLGLPESSYITMQKAAILNTCRIVRHFLQEDTNNYLG

SEQ ID NO: 32830 - protein, 942 aa, Marasmia exigua
MGFKIKTHKSKNTQKPEKQPWQVRLENDITQLRADIARLIQYISGDNRSNKLISKVQKILNKNKKHSTHENNNKTPRDVLDTLKQKLSLKSHRLARYMKALKRKTDNKLFNSSERAFYRRLSDKATEIDGSAIPSEENLKGYWAEIWEREHGHNEDARWIKEEERKWNNIDEMEFSDITKEDIETVTRKMKNWKAPGRDGVHNFWYKKFGRLHDTFAKKCTELIKGEEDLPEFVTKGITYMLPKNSDTSNPSQYRPITCLPTLYKLITSCITNKINAHIELHNILTEEQKGCRQNHRGCKEQLIIDSTIIKKANKHNKNLHLTYIDYKKAFDSVPHSWLIRVLQIYKINPTIITFLEDAMTKWRTVLSLSTKTTNITTDEIQISNGIFQGDSLSSLWFCLALNPLSSLLTQSSYGYPLTDEVAVSHLMYMDDIKLYANSESNMRNLIELTANFSNDINMTFGLDKCKTLHIKKGKIVSGDFNICNEINIRAMDMNDTYKYLGIKQNRNINHTQIKKELKMEYTRRVSQLCKKHLNSKHLFMAINTYAIPVLTYSFGVIKWSLTDISNLQVKTRTTLTKNKYLHPKSAIERMTVERDKGGRGLIDLKVLWENQIANIRKFFYEKAKNSKIHQAVIESDCNFTPLNLQSNNISFDTRQESENLKLDTWRKKQLHGRHIQDLEKNHIDMNASNKWLKLGYLFPETEGFLISIQDQVINTKNYRKYIIKDPHAQDDRCRKCHRNPETIQHILNACPVLTQTDYTHRHNQVAYYIHQKLAIKHKLLPPHVKPYYQYLPKAVLENSNCKLYFDRAILTDKTTHCNRPDITLLDKINNTAYIIDITVPNTHNIKKSISEKIHKYSELKEEILRIWNLDKVYIVPLVLSSTGVIPKHLHHSIKLLDLPENSFITMQKAAILNTCRIVRRFLQDEPYEHTNPTDTHTDSQM

SEQ ID NO: 32831 - protein, 934 aa, Marasmia exigua
MGLKVQTQERKNTPKPDKQPWQIRLENDITQLRADIARITQYISGNNLSNKLVLKVQKIIKKNQIHSTHENNNRTPQDVLDTLKQKLALKSHRLARYLKSLKRKTDNKLFSSNEKVFYRSLGDKAIELTESTTPNEESLKGYWAKIWEREQGHNEEVSWIKDEERKWDSIEEMDFLEINKEDIEAVTRKMKNWKAPGRDGVHNFWYKKFVTLHDILAKKCTELIKGEEELPDFVTKGITYMLPKSSDTSNPSQYRPITCLPTLYKLITSCITNKINAHIETNNILTEEQKGCRQNHKGCKEQLIIDSTILRQANRKNRNLHLTYIDYKKAFDSVPHSWLIRVLQIYKINPTIITFLEDAMTKWKTVLSFSTKTTNITTDEIQISNGIFQGDSLSPLWFCLALNPLSSLLTQSNYGYHLTDEAVVSHLMYMDDIKLYANSGADMKKLIEITAHFSKDINMTFGLDKCKTLHIKKGKILSGDFNINEEFNIKSMDINDTYKYLGIKQNRNINHTQIKKDLGTEYIRRVNLLCKKHLNSKNLFKALNTYAIPILAYSFGVIKWSNTDISKLQIKTRTTLTKNNYLHPKSAIERMSIKRDQGGRGLIDLQELWEIQIDNMRQFFFHKSETSDLHKAVIESDKNYTPLNLQSKDIMFNTAEESRNVKLEAWRKKQLHGRHIQDLEQTHIDENASNKWLKLGYLFPETEGFLISIQDQVVNTKNYRKYIIKDPHTQDDRCRKCHRNSETIQHIINACPILTQTDYTHRHNQVAFYIHQKLAIKHTLLPPTVKPYYEYTPKAVLESSSCKLYFDRAILTDKTTHCNRPDITLVDKIHNTAYLIDITVPNTHNIKKAISDKIHKYSELKEEILRIWNLDKVYIVPLVLSSTGVIPTHLHHSIKLLGLPENTYITMQKAAILNTCRIVRRFLQDEPYDSNPPN

SEQ ID NO: 32832 - protein, 1444 aa, Marasmia exigua
MESQQKRYSLRPLPGGYRRGTSGADAGCHSMRTVGGEELNRRALAGHEPEVTSAEINSVPSSPSSTYSLFPSIGSSPHSFEDQNTSRSTTASPEDERNKSYRPRPGDRRGTSGTGAGRDSMRSARSRQSNRRTIVKPQNSADMVEHLQNGSNSPPQQIYVAANPTYRRSPTSSTHSMQLDDVVQETSVNNSAPIAGSGRVRRRWSAEMNEFILRTYFQITKLEEDTTSYLPFLHEKFIEKFPDMKNVCRQRVGDQRRAIINKKMLPQTTIDSIRNQVASELNKTLNTNTHQLSKNFTPIRITHTRQTTTQKRMRWTLEQNETILRAYYKLTNLETNLTTYRQAVHQAFIQTYPQLSHITEQRIADQNRLILMGKYIGKDRMNIIRREVAEELRIQHESLIEHHSYGNSLLNPRTENNNATTEIDDSTQISNDTALQTQTENVNTTVRYGQNENLDTLVKELEDKLEAAIDRYLDIVPEERPRLPKLRENKDLYKIVAIFNRKILHNFLKEDLTVTNLHTLIYCSAVVISEKMGLKVQTQERKNTPKPDKQPWQIRLENDITQLRADIARITQYISGNNLSNKLVLKVQKIIKKNQIHSTHENNNRTPQDVLDTLKQKLALKSHRLARYLKSLKRKTDNKLFSSNEKVFYRSLGDKAIELTESTTPNEESLKGYWAKIWEREQGHNEEASWIKDEERKWDSIEEMEFLEINKEDIEAVTRKMKNWKAPGRDGVHNFWYKKFVTLHDILAKKCTELIKGEEELPDFVTKGITYMLPKSSDTSNPSQYRPITCLPTLYKLITSCITNKINAHIETNKILTEEQKGCRQNHKGCKEQLIIDSTILRQANRKNRNLHLTYIDYKKAFDSVPHSWLIRVLQIYKINPTIITFLEDAMTKWKTVLSLSTKATNITTDEIQISNGIFQGDSLSPLWFCLALNPLSSLLTQSNYGYHLTDEAVVSHLMYMDDIKLYANSGADMKKLIEITAHFSKDINMSFGLDKCKTLHIKKGKILSGDFNINEEFNIKSMDINDTYKYLGIKQNRNINHTQIKKDLGTEYIRRVNLLCKKHLNSKNLFKALNTYAIPILTYSFGVIKWSTTDISKLQIKTRTTLTKNNYLHPKSAIERMSIKRDQGGRGLIDLQVLWEIQIDNMRQFFFHKSETSDLHKAVIESDKNYTPLNLQSKDIMFNTAEESRNDKLEAWRKKQLHGRHIQDLEQTHIDENASNKWLKLGYLFPETEGFLISIQDQVINTKNYRKYIIKDPHTQDDRCRKCHRNPETIQHIINACPILTQTDYTHRHNQVAFYIHQKLAIKHTLLPPTVKPYYEYTPKAVLESSSCKLYYDRAILTDKTTHCNRPDITLVDKIHNTAYLIDITVPNTHNIKKAISDKIHKYSELKEEILRIWNLDKVYIVPLVLSSTGVIPTHLPPQYQTIRSPGKYIYNNAKSCYS

SEQ ID NO: 32833 - protein, 1089 aa, Marasmia exigua
MHKVAGRYLSSYYRSIIIIIIIIEHHSYGNSLVNPRTNENNNATTEIDDSTQTSNDTALQTQTENVNTTVRYGQNENLDTLVKELEDKLEAAIDRYLDIVPEERPRLPKLRENKDLYKIIAIFNRKILHNFLKEDLTVTNLHTLIYCSAVVISEKMGLKVQTQERKNTPKPDKQPWQIRLENDITQLRADIARITQYISGNNLSNKLVLKVQKIIKKNQIHSTHENNNRTPQDVLDTLKQKLALKSHRLARYLKSLKRKTDNKLFSSNEKVFYRSLSDKAIELTESTTPNEESLKGYWAKIWEREQGHNEEVSWIKDEERKWDSIEEMEFLEINKEDIEAVTRKMKNWKAPGRDGVHNFWYKKFVTLHDILAKKCTELIKGEEELPDFVTKGITYMLPKSSDTSNPSQYRPITCLPTLYKLITSCITNKINAHIETNKILTEEQKGCRQNHKGCKEQLIIDSTILRQANRKNRNLHLTYIDYKKAFDSVPHSWLIRVLQIYKINPTIITFLEDAMTKWKTVLSLSTKTTNITTDEIQISNGIFQGDSLSPLWFCLALNPLSSLLTQSNYGYHLTDEAVVSHLMYMDDIKLYANSGADMKKLIEITAHFSKDINMTFGLDKCKTLHIKKGKILAGDFNINEEFNIKSMDINDTYKYLGIKQNRNINHTQIKKDLGTEYIRRVNLLCKKHLNSKNLFKALNTYAIPILTYSFGVIKWSNTDISKLQIKTRTTLTKNNYLHPKSAIERMSIKRDQGGRGLIDLQVLWEIQIDNMRQFFFHKSETSDLHKAVIESDKNYTPLNLQSKDIMFNTAEESRNVKLKAWRKKQLHGRHIQDLEQTHIDENASNKWLKLGYLFPETEGFLISIQDQVVNTKNYRKYIIKDPHTQDDRCRKCHRNSETIQHIINACPILTQTDYTHRHNQVAFYIHQKLAIKHTLLPPTVKPYYEYTPKAVLESSSCKLYFDRAILTDKTTHCNRPDITLVDKIHNTAYLIDITVPNTHNIKKAISDKIHKYSELKEEILRIWNLDKVYIVPLVLSSTGVIPTHLHHSIKLLGLPENTYITMQKAAILNTCRIVRRFLQDETYDSNPPN

SEQ ID NO: 32834 - protein, 1451 aa, Marasmia exigua
MESQRRKYSLRPLPGGYRRGTSGADAGCHSMRTVGGEELNRRALAGHEPEATSAENNSVPSSPSSSYSLFPSIGSSPHSFEDPNTSRSTTASPDDERNGSYMPRPGGRRGTSGAGAGRDSMRSARSRRVNQYATANSPSIEPSSRDSPISSIFSMQLDDVVQETTVTNPAPIASRTKVRRRWSKKMNEFILRTYFKITRLEEDTSSYLPLLHETFIEEFPDMRDVCRQRVGDQRRAIINKKMLPQTTIDSIRNQVASELDKDPNTQLQPQNFTSHITQSRQTTTQTRMKWTLQQNEAILRAYYKLTDLETNLTAYRQTLHQLFINSYPQLAHITEQRIADQNRLILMGKYISKDRMSIIRMEVAEELAQEREPIHIESYRDRLNNTQTTTHNENITSITITGEDQSQFDATLQPVSQNRDRTGRSELHDDNIRRLEKELSEKLETAIEQYSYINPEERPRLPRLRENKDLYKIVALFNNKILQKFLTEDLSITCLHTLIYCSAVVISEKMGFKIKTHKSKNTQKPEKQPWQVRLENDITQLRADIARLIQYISGDNRSNKLISKVQKILSKNKKHSTHENNNKTPRDVLDTLKQKLSLKSHRLARYMKALKRKTDNKLFNSSERAFYRRLSDKATEIDGSAIPSEENLKGYWADMWEREQGHNEDARWIKEEERKWNNIDEMEFSDITKEDIEIVTRKMKNWKAPGRDGVHNFWYKKFGRLHDTIAKKCTELIKGEEDLPEFVTKGITYMLPKNSDTSNPSQYRPITCLPTLYKLITSCITNKINAHIELHNILTEEQKGCRQNHRGCKEQLIIDSTILKKANKHNKNLHLTYIDYKKAFDSVPHSWLIRVLQIYKINPTIITFLEDAMTKWRTVLSLSTKTTNITTDEIQISNGIFQGDSLSPLWFCLALSPLSSLLTQSSYGYPLTDEVAVSHLMYMDDIKLYANSESNMRNLIELTANFSNDINMTFGLDKCKTLHKKKGKIVSGDFNICNEINIRAMDMNDTYKYLGIKQNRNINHTQIKKELKMEYTRRVSQLCKKHLNSKHLFKAINTYAIPVLTYSFGVIKWSLTDISNLQVKTRTTLTKNKYLHPKSAIERMTVERDKGGRGLIDLKVLWENQIANIRKFFYEKAKNSKIHQAVIESDCNFTPLNLQSNNISFDTRQESENLKLDTWRKKQLHGRHIQDLEQNHIDMNASNKWLKLGYLFPETEGFLISIQDQVINTKNYRKYIIKDPHAQDDRCRKCHRNPETIQHILNACPVLTQTDYTHRHNQVAYYIHQKLAIKHKLLPPHVKPYYQYLPKAVLENPNCKLYFDRAILTDKTTHCNRPDITLLDKINNTAYIIDITVPNTHNIKKSISEKIHKYSELKEEILRIWNLDKVYIVPLVLSSTGVIPKHLHHSIKLLDLPENSFITMQKAAILNTCRIVRRFLQDEPYEHTNPTDTHTDSQM

SEQ ID NO: 32835 - protein, 1467 aa, Cnaphalocrocis medinalis
MESQQKRYSLRPLPGGYRRGTSGADAGCHSMRTVGGEELNRRALAGNEPEDTSAENNSGPSSPSSTYSLFPSIGSSPHSFEDPNTSRSTIASPDDERSLSYRPRPGVRRGTSGSGAGRDSMRSASSRQCDRHTIVKPQNIANMMEYSENGSNSPSLQTYTAEPSYRRSPTSSTCSMQLDDVVQETSVAHTAPIASSTRVRRRWSTKMNEFILRTYFHLTRLEEDTNSYLPLLHDKFIKEFPEMKDVGRQRVGDQRRAIMNKKMLPQITIDSIRNQVALELDIINPNTNTQFSQNFTQNMTTQTRQTTTQTRMRWTLEQNETILRAYYKVTNLETNLTTYRQAVHQSFIQTHPQLSHITEQRIADQNRLILMGKYISKDRMNIIRSEVTEELAQQHDQLQVESYSNSLTTPQSTQNTTTEIDNPQTQLDSIHQSPMLNMNTISSPEQYYGNSGRLEKELLEQLEAAIEQYSNVNPEERPRLPRLRENRDLYKIIALFNSKILRNYVKEDLSVKDLHTLIYCSAVVISEKLGFKIKTQSSRHTPKPEKQPWQIRLENDITQLRADIARLIQYISGNNISNKLILCVQKILKRNQKHSTHDNNNKTPQDVLDTLKQKLSLKSHRLARYLKALQRKADNKLFSSSEKGFYRSLGDKQIEINDSTAPDEENLKSYWAEIWEREQVHNDDARWIKDEERKWDSIEEMEFTDVTKEDIETVTMKMKNWKAPGRDGVHNFWYKKLVVLHDMLAKKCTGLIKGEEELPDFVTKGMTYMLPKSSDTSNPSQYRPITCLPTLYKLITSCITNKINKHIESNNILTEEQKGCRQNHKGCKEQLIIDSTILRQANKNNKNLHLTYIDYKKAFDSVPHSWLIRVLQIYKINPTIITFLEDAMTKWKTVLSLSTKTTTITTDEIQISNGIFQGDSLSPLWFCLALNPLSNLLTQSSYGYPLTDEVMVSHLMYMDDIKLYANTAKDMETLIQLTANFSKDINMTFGLDKCKTLHIKKGKIVSGDFNINEDINIKSMDINDTYKYLGIKQNKYINHTQIKKELRTEYIRRVSLICKKHLNSKNLFKALNTYAIPILTYSFGVIKWSNTDISNLQIKTRTTLTKNKYLHPKSAIERMTIKRDKGGRGLIDLKLLWENQVENIRKFFYEKANSSALHKAVIDSDNNFTPLNLQCNNITFNTIQEAEKLKLDTWRKKQLHGRHVQDLEQNHIDMNASNKWLKLGYLFPETEGFLISIQDQVINTKNYRKYIIKDPRAQDDRCRKCHRNPETIQHIINACPVLAQTDYTHRHNQVAYYVHQKLAIKHKLLPPNPKPYYEYLPKSVLESSTCKLYFDRAILTDKTTHFNRPDITLVDKINNTAYLIDVTVPNTHNIKKSISEKVHKYTELKEEISRIWNLDKVYIVPIVLSSTGVIPKHLHHSIKLLDLPENSYVTMQKAAILNTCRIVRKFLQDEPYESTNLIQTDFN

SEQ ID NO: 32836 - protein, 1400 aa, Ostrinia nubilalis
MELRSKRVRIMSLPGGYRRGTSGADAGCHSLRTVGGEELNRRALAGVIPEDTTADPTLIDQSLSTTCNSPTTTSSSYNPSRASSPTPSSTGSMLLEDVVQTTISVSSSAPTAYSQKTRRRWSPDMNEFILRNYLLLTKLETDIKGYLGPLHEQFIKKFPEMNDVSRQRIGDQRRAIVTKKLIPQESVQRIYNQVKSELQNTSIPTFHNPNIPTTSTSYSDKHTITATPQTRLRWTNEQNEYIIREYFKITQIDTNKTAYRQPLHLAFINNFPHLSHLSEQRIADQRRLILANKYICSDRLNIIKAEVAEELKACENLQTQNFDPQYTSPNFTLNTTQSETTLNDSTTETLGTQSEISLPILTQHSQSQHTLETDNTNHTDQVIPTKLEAELTEKLKETLELYAEIDPEARPRLPRLRENKQLYQLVHLFNKNILKMFLSTNATISDIHTLIYCTAMVIGKQLGYRINEDRDSNKRHTKSEKQPWQIRLEKDIATLRVDIGRLSQYIINNNRSAKIVREVKLILNKNKIHSSHEGNNTTPQDVLDTLKQKLALKAHRLARYLKALKRKNDNKLFVNNEKGFYRQLTSTNDNNRQTPIPDKEDLKNYWGDLWEKQEVHNEEAEWIKDEEKKWESIDEMEFADITREDIEDVTRKMKNWKAAGIDWVQNFWYKKLAFLHDVLAEKCTGIIKGEEDFPEFMTKGITHMLPKSSDTQNPSQYRPITCLPTLYKLITSCITNKINSHIEANNILAEEQKGCRQSHKGCKEQLIIDSTILKHAHRHNRNLHLTYIDYKKAFDSIPHSWLIRVLQIYKINPTIITFLEDAMTKWKTTLSLSTENTKITTDEIHISSGIFQGDSLSPLWFCLALNPLSNLLNQSKNGYKLTNNATVTHLMYMDDIKLYGKSSKDMENLLTITTNFSKDINMKFGLDKCKTLHIHKGKILAGDYNIDEEIHIKSMDINDTYKYLGIKQNKYINHTQIKQDLIAEYLRRVNILCRKHLHSKNLFKALNTYAIPVLTYSFAVIKWTNTDISNLQIKTRTTLTKHKYLHPKSAIERMTIKREKGGRGLIDLKVLWEGQLSNIRKFFYSKTNSLIHQAVIELDDNMTPLNLKQREMNFNSEEHSTKEKLNTWRQKQLHGRHLQDLEQPHVDPVASNKWLKLGYLFPETEGFLISIQDQVVNTKNYRKFIIKDPNALDDRCRKCHRQPETIQHIINACPVLTQNDYTHRHNQIAHYVHQKLAIKYKLLPPKVEPYYQYTPKAVLESPSHKIYFDRAILTDKTIYCNRPDITVVDKNNKIAYLIDIAVPNTHNLKRSITDKIHKYSELKDEIQRIWKLDKVYIVPLVLSSTGVIPRHLHRSISLLELPEHTYITMQKAAILNTCRIVRRFLQDEPTISSELSQTMT

SEQ ID NO: 32837 - protein, 1040 aa, Celastrina argiolus
MTLNYLEAERGDSVQRPEQSGWACLVCARTFTTKTGLGVHKRRAHPILANTEAAPNMVKRRWSDEELALLAVTEAQLTAEKGKCTNVDLVARLPHLNRTIEAIKGQRRSQKYRSLVQSYLAAGPEVDPIPEMLATEGSAQGELLNVVAQPSESLGDKGESIAYPAGEPSVAVVVPPGVAETVSELLARAAQRKSRFGLSAKAARRLPKTGCDIRAQSARVSKRMLRRIEYARVQELYKKNRGRAAAEVIDGHCRVVEHSLDDLEAYWRPIFEAVSGARGPTPEVLEAVKRRKGQYGGAEDTSHLWDPITVEEVRDTRLDPGTAPGPDGIRAEEWANVPADRKAEIFSWWMSTGETPEPLRQCRTIFVPKKDSPAGPGDYRPISIASIPLRQMHAILARRLLACCPPDPRQRGFIRADGTLENTAVLDAVMADCRKRLKECHVATLDFSKAFDTVSHKALLELLRARGLPKAFIDYIARLYETATTTLAAHGKTSDPVRVGKGVRQGDPLSPILFNIAMDCILESLPAYVGYRLEGELISALAYADDVVLVTGSQAGMKEVLSGVERCAEQLGLRINHSKSSVLSMVPDGHRKKLHYLTEKSFGVGRRKLRQVTCVERWRYLGVDYQATGCVMLEHDIAKALNNITKAPLKPQQRLELVRGHLVPRFMHGFVLGKISDDRLRMLDIQIRGAVRKWLRLPKDVPTAYFHAKVYDGGLGLPSLRAVVPDLIVKRYGALDRSTWEAARAAARSDKIKRKLSWARKQMRKFTIDSQGGSSTSEATSTTDYWRENLYRSVDGLELRESSKTAASTKWLRERSGRYTGRDFVQFVHTHINALPSRVRTTRGRRDGIGSKLNCRAGCMVRETTAHVIQQCHRTHGGRIERHNLVVRVFSEELTRLGWKVEVEPRFVTALGVRKPDIIAVKGEVGVIWDAQIVSGQGLLDDAHRAKRSKYGTHEELVEKVADKLRLPIACIHSTSCTLSWRGIWSRASLNEQRRLLGVEPSLFCLIPELVLRGSHTNWTRFNKMTTVKGGGQSSMLRDL

SEQ ID NO: 32838 - protein, 906 aa, Aricia agestis
MYLTNVPEASPNPEILVAGSSSPTRNVAAQPADSPGVPRESMARPADDPSVAVVVPPGVAETVSELLARAARRKSRSGLSAKAARRLHKTGIDERAHSARVSKRALRRIEYARVQELYKKNRGRAAAEVIDGQCRVVEHSLGDLEAFWRPIFEAVSGAQGPTPEVLEAARRKGQYGGAEARSHLWDPITVDEVRDTRLDLHTAPGPDGIRAEEWNAVPADRKAEIFNSWMSTGETPEPLRQCRTIFVPKKDSPAGPSDYRPISIASIPLRHMHAILAKRLLACCPPDPRQRGFIRADGTLENTAVLDAVMGDCRKRLKECHVATLDFSKAFDTVSHKALLELLRARGLPKAFIDYIARLYETATTILAVNGKTSDPVRVGKGVRQGDPLSPILFNIVMDSILDALPAYVGYRLEGALISALAYANDLVLITGSQVGMKEVLKLVDRCAEQLGLRLNHSKSSVLSLVPDGHRKKLHYLTEKSFGVGRRKLRQATCVERWRYLGVDYSAAGCVTLEQDISQALNNITRAPLKPQQRLEMVRGHLVPRFLHGFVLGKIADDRLRMLDVQIRGAVRKWLRLPKDVPTAYFHAKVKDGGLGLPSLRAVVPELIVKRYGALDRSTWEAARAAARSDKIRKKLSWARRQMRRFSLDTEGGSSTSEATNTADYWRESLYRSVDGFELRESSKTAASTKWLRERSGRYTGRDFVQFVHTHINALPSRVRTTRGRRNGTGSELNCRAGCMVSVQQCHRTHGGRIERHNLVVRVFSEEMARQGWQVEVEPKIVTSLGIRKPDIIAVKGEVGVIWDAQIVSGQRPLDDAHRTKRTKYGSDVELVEKVADKLGLPIGCVQATSCTLSWRGIWSRASVNEQRRLLGLGSSLYDWIPELVLRGSHTNWTRFNQMTTVKERG

SEQ ID NO: 32839 - protein, 977 aa, Glaucopsyche alexis
MVKRRWSDEELALLASTEAQLVAEKGKCTNVDLVARLPHLNRTLEAIKGQRRGQKYRSLVQMYLANVPEASPNPEILAAEGLSLPGHAAAQPADSLGDPGDSMARPADEPSVAVVVPPGVAETVSELLARADQRKSRYGLSAKAARRLPKTGTGFDGRARSAKVSKRTLRRIEYARVQELYKKNRGRAAAEVIDGQCRVVEHSLEDLEAYWRPIFEAVSGAPGPTPEVLEAARRKGQYGGAEARSRLWDPVTIEEVRDTRLDPGTAPGPDGIRAEEWGKVPADRKAEIFNCWMNTGETPEPLRQCRTVFVPKKDSPGGPGDYRPISIASIPLRQLHAILARRLLACCPPDPRQRGFIRADGTLENTAVLDAVMGDCRKKLKECHVATLDFSKAFDTVSHKALLELLRARGLPKAFVDYVARLYDSATTILAAHGKSSEPVRVGKGVRQGDPLSPMLFNIAMDSILDSLPSYVGYRLEGDLISALAYADDVVLVTGSKAGMQEVLSRVERCAEQLGLRINHSKSSVLSMVPDGHRKKLHYLTEKSFTVGRRKLRQATCVERWRYLGVDYQATGCVTLEHDITQALTNISKAPLKPQQRLEMVRGHLVQRFMHGFVLGKIADDRLRMLDVQIRSAVRKWLRLPKDVPKAYFHAEVKDGGLGLPSLRAVVPDLIVRRYGALDRSTWEAARAAARSDKIRKKLSWARKQLGKFTNGTTGGSSTSEASSTADYWRESLYSSVDGFELRESSNTAASTKWLRERSGRYTGRDFVQFVHTHINALPSRVRTTRGRREGIGSELNCRAGCMVRETTAHVIQQCHRTHGGRIERHNLVVRVVSEEMARLGWHVEVEPRIATALGVRKPDIIAVKGGDGVIWDAQIVSGQRPLDDAHRAKRSKYGTHKELVEKVADKLGLPIGCVQATSCTLSWRGIWSRASLNEQRRLLGLEPSLLNTIPELVLRGSHMNWTRFNQMTTVKGRGQT

SEQ ID NO: 32840 - protein, 973 aa, Aricia agestis
MVKRRWSDEELALLATTEAQLVAEKGKCTNIDLVARLPHLNRTVEAIKGQRRSQKYRSLVQMYLTNVPEASPNPEILVAGSSSPTRNVAAQPADSPGVPRESMARPADDPSVAVVVPPGVAETVSELLARAARRKSRSGLSAKAARRLHKTGNDERAHSARVSKRALRRIEYARVQELYKKNRGRAAAEVIDGQCRVVEHSLGDLEAFWRPIFEAVSGAQGPTPEVLEAARRKGQYGGAEARSHLCDPITVDEVRDTRLDLHTAPGPDGIRAEEWNAVPADRKAEIYNSWMSTGETPEPLRQCRTIFVPKKDSPAGPSDYRPISIASIPLRHMHAILAKRLLACCPPDPRQHGFIRADGTLENTAVLDAVMGDCRKRLKECYVATLDFSKAFDTVSHKALLELLRARGLPKAFIDYIARLYETATTILAVNGKTSDPVRVGKGVRQGDPLSPILFNIVMDSILDALPAYVGYRLEGALISALAYADDLVLITGSQVGMKEVLKLVDRCAEQLGLRLNHSKSSVLSLVPDGHRKKLHYLTEKSFGVGRKKLRQATCVERWRYLGVDYSAAGCVTLEQDISQALNNITRAPLKPQQRLEMVRGHLVPRFLHGFVLGKIADDRLRMLDVQIRGAVRKWHRLPKDVPTAYFHAKVKDGGLGLPSLRAVVPELIVKRYGALDRSTWEAARAAARSDKIRKKLSWARRQMRRFSLDTEGGSSTSEATTTADYWRESLYRSVDGFELRESSKTAASTKWLRERSGRYTGRDFVQFVHTHINALPSRVRTTRGRRNGTGSELNCRAGCMVRETTAHAIQQCHRTHGGRIERHNLVVRVFSEEMARQGWHVEVEPKIVTSLGIRKPDIIAVKGEVGVIWDAQIVSGQRPLDDAHRTKRTKYGSDVELVEKVADKLGRPIGCVQATSCTLSWRGIWSRASVNEQRRLLGLGSSLYDWIPELVLRGSHTNWTRFNQMTTVKERG

SEQ ID NO: 32841 - protein, 973 aa, Plebejus argus
MVKRRWSDEELALLAITEAQLVTEKGKCTNVDLVARLPHLNRTVEAIKGQRRSQKYRSLVRAYLTSVPEASPNPEMLAAGSSSPARNVAAQPADSPGVTRESMARPADDPSVAVVVPPGVAETVSELLARAARRKSRSGLSAKAARRLHKTGNDGRAHSARVSKRALRRIEYARVQELYKKNRGRAAAEVIDGQCRVVEHSLEDLEAYWRPIFEAVSGARGPTPEVLEAARRKGQYGGAEARSHLWDPITVEEVRDTRLDLHTAPGPDGIWAEEWNAVPADRKAEIFNSWMSTGETPEPLRQCRTIFVPKKDSPAGPGDYRPISIASIPLRHMHAILAKRLLACCPPDPRQRGFIRADGTLENTAVLDAVMGDCRKRLKECHVATLDFSKAFDTVSHKALLELLRARGLPKAFVDYIARLYETASTILAANGKTSDPVRVGKGVRQGDPLSPILFNIVMDSILDSLPAYVGYRLEGALISALAYADDVVLITGSLVGMKEVLKLVERCAEQLGLRLNHSKSSVLSLVPDGHRKRLHYLTEKSFGVGRRKLRQATCVERWRYLGVDYSAAGCVALEQDINQALNNITRAPLKPQQRLEMVRGHLVPRFMHGFVLGKIADDRLRMLDVQIRGAVRKWLRLPKDVPTAYFHAKVQDGGLGLPSLRAIVPELIVKRYGNLDRSTWEAARAAARSEKIRKKLSWARKQLRKYLHDTEGGSSTSEATSTADYWRESLYRSVDGFELRESSKTAASTKWLRERSGRYTGRDFVQFVHTHINALPSRVRTTRGRRNGTGSELNCRAGCMVRETTAHTIQQCHRTHGGRIERHNLVVRVFSEEMARQGWHVEVEPKFVTSLGIRKPDIIAVKGEVGVIWDAQIVSGQRPLDDAHRTKRTKYGSDEELVGKVADRLGLPIGCVQATSCTLSWRGVWSRASYNEQRRLLGLGSSLFEWIPELVLRGSHTNWTRFNQMTTVKGKG

SEQ ID NO: 32842 - protein, 1095 aa, Aricia agestis
MALPTGAISPVRSACRPSLCVSVWGFEKHRASGRFRVSSPSLPFIVLALDGNSEYSLLGLPLEPSSRTINSPDAERGDSDRRLEPSGWACLVCARTFTTKNGLGVHKRRAHPVLANIEAAPNMVKRRWSDEELALLATTEAQLVAEKGKCTNVDLVARLPHLNRTVEAIKGQRRSQKYRSLVQMYLTNVPEASPNPEILVAGSSSPTRNVAAQPADSPGVPRESMARPADDPSVAVVVPPGVAETVSELLARAARRKSRSGLSAKAARRLHKTGNDERAHSARVSKRALRRIEYARVQELYKKNRGRAAAEVIDGQCRVVEHSLGDLEAFWRPIFEAVSGAQGPTPEVLEAARRKGQYGGAEARSHLWDPITVDEVRDTRLDLHTAPGPDGIRAEEWNAVPADRKAEIFNSWMSTGETPEPLRQCRTIFVPKKDSPAGPSDYRPISIASIPLRHMHAILAKRLLACCPPDPRQRGFIRADGTLENTAVLDAVMGDCRKRLKECHVATLDFSKAFDTVSHKALLELLRARGLPKAFIDYIARLYETATTILAVNGKTSDPVRVGKGVRQGDPLSPILFNIVMDSILDALPAYVGYRLEGALISALAYADDLVLITGSQVGMKEVLKLVDRCAEQLGLRLNHSKSSVLSLVPDGHRKKLHYLTEKSFGVGRRKLRQATCVERWRYLGVDYSAAGCVTLEQDIAQALNNITRAPLKPQQRLEMVRGHLVPRFLHGFVLGKIADDRLRMLDVQIRGAVRKWLRLPKDVPTAYFHAKVKDGGLGLPSLRAVVPELIVKRYGALDRSTWEAARAAARSEKIRKKLSWARRQMRRFALDTEGGSSTSEATTTADYWRESLYRSVDGFELRESSKTAASTKWLRERSGRYTGRDFVQFVHTHINALPSRVRTTRGRRNGTGSELNCRAGCMVRETTAHAIQQCHRTHGGRIERHNLVVRVFSEEMARQGWHVEVEPKIVTSLGIRKPDIIAVKGEVGVIWDAQIVSGQRPLDDAHRTKRTKYGSDVELVEKVADKLGLPIGCVQATSCTLSWRGVWSRASVNEQRRLLGLGSSLYDWIPELVLRGSHTNWTRFNQMTTVKERG

SEQ ID NO: 32843 - protein, 1095 aa, Aricia agestis
MAPPTGAISPVRSACRPSLCVTVWGFEKHRATGRIRVSGPLLPLIVLAQDCNNEYSLLGLPLEPSSRTINSPDAERGDSDRRLEPSGWACLVCARTFTTKNGLGVHKRRAHPVLANIEAAPNMVKRRWSDEELALLATTEAQLVAEKGKCTNVDLVARLPHLNRTVEAIKGQRRSQKYRSLVQMYLTNVPEASPNPEILVAGSSSPTRNVAAQPADSPGVPRESMARPADDPSVAVVVPPGVAETVSELLARAARRKSRSGLSAKAARRLHKTGNDERAHSARVSKRALRRIEYARVQELYKKNRGRAAAEVIDGQCRVVEHSLGDLEAFWRPIFEAVSGAQGPTPEVLEAARRKGQYGGAEARSHLWDPITVDEVRDTRLDLHTAPGPDGIRAEEWNAVPADRKAEIFNSWMSTGETPEPLRQCRTIFVPKKDSPAGPSDYRPISIASIPLRHMHAILAKRLLACCPPDPRQRGFIRADGTLENTAVLDAVMGDCRKRLKECHVATLDFSKAFDTVSHKALLELLRARGLPKAFIDYIARLYETATTILAVNGKTSDPVRVGKGVRQGDPLSPILFNIVMDSILDALPAYVGYRLEGALISALAYADDLVLITGSQVGMKEVLKLVDRCAEQLGLRLNHSKSSVLSLVPDGHRKKLHYLTEKSFGVGRRKLRQATCVERWRYLGVDYSAAGCVTLEQDIAQALNNITRAPLKPQQRLEMVRGHLVPRFLHGFVLGKIADDRLRMLDVQIRGAVRKWLRLPKDVPTAYFHAKVKDGGLGLPSLRAVVPELIVKRYGALDRSTWEAARAAARSDKIRKKLSWARRQMRRFSLDTEGGSSTSEATNTADYWRESLYRSVDGFELRESSKTAASTKWLRERSGRYTGRDFVQFVHTHINALPSRVRTTRGRRNGTGSELNCRAGCMVRETTAHAIQQCHRTHGGRIERHNLVVRVFSEEMARQGWQVEVEPKIVTSLGIRKPDIIAVKGEVGVIWDAQIVSGQRPLDDAHRTKRTKYGSDVELVEKVADKLGLPIGCVQATSCTLSWRGVWSRASVNEQRRLLGLGSSLYDWIPELVLRGSHTNWTRFNQMTTVKERG

SEQ ID NO: 32844 - protein, 973 aa, Plebejus argus
MVKRRWSDEELALLAITEAQLVTEKGKCTNVDLVARLPHLNRTVEAIKGQRRSQKYRSLVRAYLTNVPEASPNPEMLAAGSSSPARNVAAQPADSPGVTRESMARPADDPSVAVVVPPGVAETVSELLARAARRKSRSGLSAKAARRLHKTGNDGRAHSARVSKRALRRIEYARVQELYKKNRGRAAAEVIDGQCRVVEHSLEDLEAYWRPIFEAVSGARGPTPEVLEAARRKGQYGGAEARSHLWDPITVEEVRDTRLDLHTAPGPDGIWAEEWNAVPADRKAEIFNTWMSTGETPEPLRQCRTIFVPKKDSPAGPGDYRPISIASIPLRHMHAILAKRLLACCPPDPRQRGFIRADGTLENTAVLDAVMGDCRKRLKECHVATLDFSKAFDTVSHKALLELLRARGLPKAFVDYIARLYETASTILAANGKTSDPVRVGKGVRQGDPLSPILFNIVMDSILDSLPAYVGYRLEGALISALAYADDVVLITGSLVGMKEVLKLVERCAEQLGLRLNHSKSSVLSLVPDGHRKRLHYLTEKSFGVGRRKLRQATCVERWRYLGVDYSAAGCVALEQDINQALNNITRAPLKPQQRLEMVRGHLVPRFMHGFVLGKIADDRLRMLDVQIRGAVRKWLRLPKDVPTAYFHAKVQDGGLGLPSLRAIVPELIVKRYGNLDRSTWEAARAAARSEKIRKKLSWARKQLRKYLHDTEGGSSTSEATSTADYWRESLYRSVDGFELRESSKTAASTKWLRERSGRYTGRDFVQFVHTHINALPSRVRTTRGRRNGTGSELNCRAGCMVRETTAHTIQQCHRTHGGRIERHNLVVRVFSEEMARQGWHVEVEPKFVTSLGIRKPDIIAVKGEVGVIWDAQIVSGQRPLDDAHRTKRTKYGSDEELVGKVADRLGPPIGCVQATSCTLSWRGVWSRASYNEQRRLLGLGSSLFEWIPELVLRGSHTNWTRFNQMTTVKGKG

SEQ ID NO: 32845 - protein, 885 aa, Plebejus anna
MVKRRWSDEELALLAITEAQLVTEKGKCTNVDLVARLPHLNRTVEAIKGQRRSQKYRNLVQMYLTNVPEASPNPEMLAAGGSSPARNVAAQPADSPGVTRESMARPADDPSVAVVVPPGVAETVSELLARAARRKSRSGLSAKAARRLHKTGIDERAHSVRVSRRTLRRIEYARVQELYKKNRGRAAAEVIDGQCRVVEHSLEDLEAYWRPIFEAVSGARGPTPEVLEAARRKGQYGGAEARSHLWDPITVDEVRDTRLDLHTAPGPDGIRAEEWNAVPADRKAEIFNSWMSTGETPEPLRQCRTIFVPKKDSPAGPGDYRPISIASIPLRHMHAILAKRLLACCPPDPRQRGFIRADGTLENTAVLDAVMGDCRKRLKECHVATLDFSKAFDTVSHKALLELLRARGLPKAFVDYIARLYETATTILAANGKTSDPVRVGKGVRQGDPLSPILFNLVMDSILDSLPAYVGYRLEGVLISALAYADDVVLITGSLVGMKEVLKLVERCAEQLGLRLNHSKSSVLSLVPDGHRKRLHYLTEKSFGVGRRKLRQATCVERWRYLGVDYSAAGCVALEQDINQALNNITRAPLKPQQRLEMVRGHLVPRFMHGFVLGKIADDRLRMLDVQIRGAVRKWLRLPKDVPTAYFHAKVQDGGLGLPSLRAIVPELIVKRYGNLDRSTWEAARAAARSEKIRKKLSWARKQLRKYLHDTEGGSSTSEATSTADYWRESLYRSVDGFELRESSKTAASTKWLRERSGRYTGRDFVQFVHTHINALPSRVRTSRGRRNGTGLELNCRAGCMVRETTAHTIQQCHRTHGGRIERHNLVVRVFSEELARQGWHVEVEPKFVTSLGIRKPDIIAVKGEVGVIWDAQIVSGQRPLDDAH

SEQ ID NO: 32846 - protein, 973 aa, Lysandra coridon
MVKRRWSDEELALLASTEAQLVAEKGKCTNIDLVARLPHLKRTVEAIKGQRRSQKYRSLVQMYLMNVPEASPNPEIPVAGCSTPTRNVAARPADSPGVAGESMARPADDPSVAVVVPPGVAETVSELLARAARRKSRSGPSAKAARRPHKTGIDERAHSARVSKRALRRMEYARVQELYKKNRGRAAAEVIDGQCRVVEHSLEDLEAYWRPIFEAVSGARGPTPEVLEAAKRKGQYGGEEARSHLWDPITVDEVRDTRLDLHTAPGPDGIRAEEWNAVPADRKAEIFNAWMSTGETPEPLRQCRTIFVPKKDSPAGPGDYRPISIASIPLRHMHAILAKRLLACCPPDPRQRGFIRADGTLENTAVLDAVMGDCRKRLKECHVATLDFSKAFDTVSHKALLELLRARGLPKAFVDYIARLYETATTILAANGKTSDPVRVGKGVRQGDPLSPILFNIVMDSILDSLPAYVGYRLEGALISALAYADDVVLITGSQVGMTEVLKLVSRCAEQLGLRLNHSKSSVLSLVPDGHRKKLHYLTEKSFGVGRRKLRQATCVERWRYLGVDYSAAGCVTLEHDITEALNNITRAPLKPQQRLEMVRGHLVPRFMHGFVLGKIADDRLRMLDVQIRGAVRKWLRLPKDVPTAYFHAKVQDGGLGLPSLRAVVPELIVKRYGALDRSSWEAARAAARSDKIRKKLSWAKRQMRKYLHDTGGGSSTSEATHTADYWRESLYRSVDGFELRESSKTAASTKWLRERSGRYTGRDFVQFVHTHINALPSRVRTTRGRRNGTGSELNCRAGCMVRETTAHAIQQCHRTHGGRIERHNLVVRVFSEELARQGWHVEVEPKVVTSLGIRKPDIIAVRGEVGVIWDAQIVSGQRPLDDAHRTKRTKYGSDVELVEKVADKLGLPIGCVQATSCTLSWRGIWSRASVNEQRRLLGLGSSLFEWIPELVLRGSHTNWTRFNQLTTVKGKG

SEQ ID NO: 32847 - protein, 973 aa, Lysandra coridon
MVKRRWSDEELALLASTEAQLVTEKGKCTNIDLVARLPHLNRTVEAIKGQRRSQKYRSLVQMYLTNVPEASPNPEIPVAGCSTPTRNVAARPADSPGVAGESMARPADDPSVAVVVPPGVAETVSELLARAARRKSRSGPSAKAARRPHKTGIDERAHSARVSKRALRRMEYVRVQELYKKNRGRAAAEVIDGQCRVVEHSLEDLEAYWRPIFEAVSGARGPTPEVLEAAKRKGQYGGEEARSHLWDPITVDEVRDTRLDLHTAPGPDGIRAEEWNAVPADRKAEIFNAWMSTGETPEPLRQCRTIFVPKKDSPAGPGDYRPISIASIPLRHMHAVLAKRLLACCPPDPRQRGFIRADGTLENTAVLDAVMGDCRKRLKECHVATLDFSKAFDTVSHKALLELLRARGLPKAFVDYIARLYETATTILAANGKTSDPVRVGKGVRQGDPLSPILFNIVMDSILDSLPAYVGYRLEGALISALAYADDVVLITGSQVGMTEVLKLVSRCAEQLGLRLNHSKSSVLSLVPDGHRKKLHYLTEKSFGVGRRKLRQATCVERWRYLGVDYSAAGCVTLEHDITEALNNITRAPLKPQQRLEMVRGHLVPRFMHGFVLGKIADDRLRMLDVQIRGAMRKWLRLPKDVPTAYFHAKVQDGGLGLPSLRAVVPELIVKRYGALDRSTWEAARAAARSDKIRKKLSWAKRQMRKYLHDTGGGSSTSEATHTADYWRESLYRSVDGFELRESSKTAASTKWLRERSGRYTGRDFVQFVHTHINALPSRVRTTRGRRNGTGSELNCRAGCMVRETTAHAIQQCHRTHGGRIERHNLVVRVFSEELARQGWHVEVEPKVVTSLGIRKPDIIAVRGEVGVIWDAQIVSGQRPLDDAHRTKRTKYGSDVELVEKVADKLGLPIGCVQATSCTLSWRGIWSRASVNEQRRLLGLGSSLFEWIPELVLRGSHTNWTRFNQLTTVKGRG

SEQ ID NO: 32848 - protein, 973 aa, Lysandra coridon
MVKRRWSDEELALLASTEAQLVTEKGKCTNIDLVARLPHLNRTVEAIKGQRRSQKYRSLVQMYLTNVPEASPNPEIPVAGCSTPTRNVAARPADSPGVAGESMARPADDPSVAVVVPPGVAETVSELLARAARRKSRSGPSATAARRPHKTGNDERAHSARVSKRALRRMEYARVQELYKKNRGRAAAEVIDGQCRVVEHSLEDLEAYWRPIFEAVSGARGPTPEVLEAAKRKGQYGGEEARSHLWDPITVDEVRDTRLDLHTAPGPDGIRAEEWNAVPADRKAEIFNAWMSTGETPEPLRQCRTIFVPKKDSPAGPGDYRPISIASIPLRHMHAILAKRLLACCPPDPRQRGFIRADGTLENTAVLDAVMGDCRKRLKECHVATLDFSKAFDTVSHKALLELLRARGLPKAFVDYIARLYETATTILAANGKTSDPVRVGKGVRQGDPLSPILFNIVMDSILDSLPAYVGYRLEGALISALAYADDVVLITGSQVGMTEVLKLVSRCAEQLGLRLNHSKSSVLSLVPDGHRKKLHYLTEKSFGVGRRKLRQATCVERWRYLGVDYSAAGCVTLEHDITEALNNITRAPLKPQQRLEMVRGHLVPRFMHGFVLGKIADDRLRMLDVQIRGAVRKWLRLPKDVPTAYFHAKVQDGGLGLPSLRAVVPELIVKRYGALDRSTWEAARAAARSDKIRKKLSWAKRQMRKYLHDTGGGSSTSEATHTADYWRESLYRSVDGFELRESSKTAASTKWLRERSGRYTGRDFVQFVHTHINALPSRVRTTRGRRNGTGSESNCRAGCMVRETTAHAIQQCHRTHGGRIERHNLVVRVFSEELARQGWHVEVEPKVVTSLGIRKPDIIAVRGEVGVIWDAQIVSGQRPLDDAHRTKRTKYGSDVELVEKVADKLGLPIGCVQATSCTLSWRGIWSRASVNEQRRLLGLGSSLFEWIPELVLRGSHTNWTRFNQLTTVKGRG

SEQ ID NO: 32849 - protein, 984 aa, Lysandra coridon
MTLLSTEAAPNMVKRRWSDEELALLASTEAQLVTEKGKCTNIDLVARLPHLNRTVEAIKGQRRSQKYRSLVQMYLTNVPEASPNPEIPVAGCSTPTRNVAARPADSPGVAGESMARPADDPSVAVVVPPGVAETVSELLARAARRKSRSGPSAKAARRPHKTGIDERAHSARVSKRALRRMEYARVQELYKKNRGRAAAEVIDGQCRVVEHSLEDLEAYWRPIFEAVSGARGPTPEVLEAAKRKGQYGGEEARSHLWDPITVDEVRDTRLDLHTAPGPDGIRAEEWNAVPADRKAEIFNAWMSTGETPEPLRQCRTIFVPKKDSPAGPGDYRPISIASIPLRHMHAVLAKRLLACCPPDPRQRGFIRADGTLENTAVLDAVMGDCRKRLKECHVATLDFSKAFDTVSHKALLELLRARGLPKAFVDYIARLYETATTILAANGKTSDPVRVGKGVRQGDPLSPILFNIVMDSILDSLPAYVGYRLEGALISALAYADDVVLITGSQVGMTEVLKLVSRCAEQLGLRLNHSKSSVLSLVPDGHRKKLHYLTEKSFGVGRRKLRQATCVERWRYLGVDYSAAGCVTLEHDITEALNNITRAPLKPQQRLEMVRGHLVPRFMHGFVLGKIADDRLRMLDVQIRGAVRKWLRLPKDVPTAYFHAKVQDGGLGLPSLRAVVPELIVKRYGALDRSTWEAARAAARSDKIRKKLSWAKRQMRKYLHDTGGGSSTSEATHTADYWRESLYRSVDGFELRESSKTAASTKWLRERSGRYTGRDFVQFVHTHINALPSRVRTTRGRRNGTGSELNCRAGCMVRETTAHAIQQCHRTHGGRIERHNLVVRVFSEELARQGWHVEVEPKVVTSLGIRKPDIIAVRGEVGVIWDAQIVSGQRPLDDAHRTKRTKYGSDVELVEKVADKLGLPIGCVQATSCTLSWRGIWSRASVNEQRRLLGLGSSLFEWIPELVLRGSHTNWTRFNQLTTVKGRG

SEQ ID NO: 32850 - protein, 1042 aa, Lysandra coridon
MNSLLGLPLEPSSRTLNSPDAERGDSDRRPEPSGWACLVCARTFTTKNGLGVHKRRAHPVLANTEAAPNMVKRRWSDEELALLASTEAQLVTEKGKCTNIDLVARLPHLNRTVEAIKGQRRSQKYRSLVQMYLTNVPEASPNPEIPVAGCSTPTRNVAARPADSPGVAGESMARPADDPSVAVVVPPGVAETVSELLARAARRKSRSGPSAKAARRPHKTGIDESAHSARVSKRALRRMEYARVQELYKKNRGRAAAEVIDGQCRVVEHSLEDLEAYWRPIFEAVSGARGPTPEVLEAAKRKGQYGGEEARSHLWDPITVDEVRDTRLDLHTAPGPDGIRAEEWNAVPADRKAEIFNAWMSTGETPEPLRQCRTIFVPKKDSPAGPGDYRPISIASIPLRHMHAILAKRLLACCPPDPRQRGFIRADGTLENTAVLDAVMGDCRKRLKECHVATLDFSKAFDTVSHKALLELLRARGLPKAFVDYIARLYETATTILAANGKTSDPVRVGKGVRQGDPLSPILFNIVMDSILDSLPAYVGYRLEGALISALAYADDVVLITGSQVGMTEVLKLVSRCAEQLGLRLNHSKSSVLSLVPDGHRKKLHYLTEKSFGVGRRKLRQATCVERWRYLGVDYSAAGCVTLEHDITEALNNITRAPLKPQQRLEMVRGHLVPRFMHGFVLGKIADDRLRMLDVQIRGAVRKWLRLHKDVPTAYFHAKVQDGGLGLPSLRAVVPELIVKRYGALDRSTWEAARAAARSDKIRKKLSWAKRQMRKYLHDTGGGSSTSEATHTADYWRESLYRSVDGFELRESSKTAASTKWLRERSGRYTGRDFVQFVHTHINALPSRVRTTRGRRNGTGSELNCRAGCMVRETTAHAIQQCHRTHGGRIERHNLVVRVFSEELARQGWHVEVEPKVVTSLGIRKPDIIAVRGEVGVIWDAQIVSGQRPLDDAHRTKRTKYGSDVELVEKVADKLGLPIGCVQATSCTLSWRGIWSRASVNEQRRLLGLGSSLFEWIPELVLRGSHTNWTRFNQLTTVKGRG

SEQ ID NO: 32851 - protein, 977 aa, Glaucopsyche alexis
MVKRRWSDEELALLASTEAQLVAEKGKCTNVDLVARLPHLNRTLEAIKGQRRGQKYRSLVQMYLTNVPEASPNPEILAAEGLSLPGHAAAQPADSLGDPGDSMARPADEPSVAVVVPPGVAETVSELLARADQRKSRYGLSAKAARRLPKTGNGFNGRARSAKVSKRTLRRIEYARVQELYKKNRGRAAAEVIDGQCRVVEHSLEDLEAYWRPIFEAVSGAPGPTPEVLEAARRKGQYGGAEARSRLWDPITIEEVRDTRLDPGTAPGPDGIRAEEWGKVPADRKAEIFNCWLNTGETPEPLRQCRTVFVPKKDSPGGPGDYRPISIASIPLRQLHAILARRLLACCPPDPRQRGFIRADGTLENTAVLDAVMGDCRKKLKECHVATLDFSKAFDTVSHKALLELLRARGLPKAFVDYVARLYDSATTILAAHGKSSEPVRVGKGVRQGDPLSPMLFNIAMDSILDSLPSYVGYRLEGDLISALAYADDVVLVTGSKAGMQEVLSRVERCAEQLGLRINHSKSSVLSMVPDGHRKKLHYLTEKSFTVGRRKLRQATCVERWRYLGVDYQATGCVTLEHDITQALTNISKAPLKPQQRLEMVRGHLVQRFMHGFVLGKIADDRLRMLDVQIRSAVRKWLRLPKDVPKAYFHAEVKDGGLGLPSLRAVVPDLIVRRYGALVRSTWEAARAAARSDKIRKKLSWARKQLGKFTNGTTGGSSTSEASSTADYWRESLYSSVDGFELRESSNTAASTKWLRERSGRYTGRDFVQFVHTHINALPSRVRTTRGRREGIGSELNCRAGCMVRETTAHVIQQCHRTHGGRIERHNLVVRVVSEEMARQGWHVEVEPRIATALGVRKPDIIAVKGGDGVIWDAQIVSGQRPLDDAHRAKRSKYGTHKELVEKVADKLGLPIGCVQATSCTLSWRGIWSRASLNEQRRLLGLEPSLLNAIPELVLRGSHMNWTRFNQMTTVKGRGQT

SEQ ID NO: 32852 - protein, 912 aa, Lysandra coridon
MYLTNVPEASPNPEIPVAGCSTPTRNVAARPADSPGVAGESMARPADDPSVAVVVPPGVAETMSELLARAARRKSRSGPSAKAARRPHKTGIDERAHSARVSKRALRRMEYARVQELYKKNRGRAAAEVIDGQCRVVEHSLEDLEAYWRPIFEAVSGARGPTPEVLEAAKRKGQYGGEEARSHLWDPITVDEVRDTRLDLHTAPGPDGIRAEEWNAVPADRKAEIFNAWMSTGETPEPLRQCRTIFVPKKDSPAGPGDYRPISIASIPLRHMHAILAKRLLACCPPDPRQRGFIRADGTLENTAVLDAVMGDCRKWLKECHVATLDFSKAFDTVSHKALLELLRARGLPKAFVDYIARLYETATTILAANGKTSDPVRVGKGVRQGDPLSPILFNIVMDSILDSLPAYVGYRLEGALISALAYADDVVLITGSQVGMTEVLKLVSRCAEQLGLRLNHSKSSVLSLVPDGHRKKLHYLTEKSFGVGRRKLRQATCVERWRYLGVDYSAAGCVTLEHDITEALNNITRAPLKPQQRLEMVRGHLVPRFMHGFVLGKIADDRLRMLDVQIRGAVRKWLRLPKDVPTAYFHAKVQDGGLGLPSLRAVVPELIVKRYGALDRSTWEAARAAARSDKIRKKLSWAKRQMRKYLHDTGGGSSTSEATHTADYWRESLYRSVDGFELRESSKTAASTKWLRERSGRYTGRDFVQFVHTHINALPSRVRTTRGRRNGTGSELNCRAGCMVRETTAHAIQECHRTHGGRIERHNLVVRVFSEELARQGWHVEVEPKVVTSLGIRKPDIIAVRGEVGVIWDAQIVSGQRPLDDAHRTKRTKYGSDVELVEKVADKLGLPIGCVQATSCTLSWRGIWSRASVNEQRRLLGLGSSLFEWIPELVLRGSHTNWTRFNQLTTVKGRG

SEQ ID NO: 32853 - protein, 973 aa, Lysandra coridon
MVKRRWSDEELALLASTEAQLVTEKGKCTNIDLVARLPHLNRTVEAIKGQRRSQKYRSLVQMYLTNVPEASPNPEIPVAGCSTPTRNVAARPADSPGVAGESKARPADDPSVAVVVPPGVAETVSELLARAARRKSRSGPSAKAARRPHKTGNDERAHSARVSKRALRRMEYARVQELYKKNRGRAAAEVIDGQCRVVEHSLEDLEAYWRPIFEAVSGAHGPTPEVLEAAKRKGQYGGEEARSHLWDPITVDEVRDTRLDLHTAPGPDGIRAEEWNAVPADRKAEIFNAWMSTGETPEPLRQCRTIFVPKKDSPAGPGDYRPISIASIPLRHMHAILAKRLLACCPPDPRQRGFIRADGTLENTAVLDAVMGDCRKRLKECHVATLDFSKAFDTVSHKALLELLRARGLPKAFIDYIARLYETATTILAANGKTSDPVRVGKGVRQGDPLSPILFNIVMDSILDSLPAYVGYRLEGALISALAYADDVVLITGSQVGMTEVLKLVSRCAEQLGLRLNHSKSSVLSLVPDGHRKKLHYLTEKSFGVGRRKLRQATCVERWRYLGVDYSAAGCVTLEHDITEALNNITRAPLKPQQRLEMVRGHLVPRFMHGFVLGKIADDRLRMLDVQIRGAVRKWLRLPKDVPTAYFHAKVQDGGLGLPSLRAVVPELIVKRYGALDRSTWEAARAAARSDKIRKKLSWAKRQMRKYLHDTGGGSSTSEATHTADYWRESLYRSVDGFELRESSKTAASTKWLRERSGRYTGRDFVQFVHTHINALPSRVRTTRGRRNGTGSELNCRAGCMVRETTAHAIQQCHRTHGGRIERHNLVVRVFSEELARQGWHVEVEPKVVTSLGIRKPDIIAVRGEVGVIWDAQIVSGQRPLDDAHRTKRTKYGSDVELVEKVADKLGLPIGCVQATSCTLSWRGIWSRASVNEQRRLLGLGSSLFEWIPELVLRGSHTNWTRFNQLTTVKGRG

SEQ ID NO: 32854 - protein, 973 aa, Lysandra coridon
MVKRRWSDEELALLASTEAQLVTEKGKCTNIDLVARLPHLNRTVEAIKGQRRSQKYRSLVQMYLTNVPEASPNPEIPVAGCSTPTRNVAARPADSPGVAGESMARPADDPSVAVVVPPGVAETVSELLARAARRKSRSGPSAKAARRPHKTGNDERAHSARVSKRALRRMEYARVQELYKKNRGRAAAEVIDGQCRVVEHSLEDLEAYWRPIFEAVSGARGPTPEVLEAAKRKGQYGGEEARSHLWDPITVDEVRDTRLDLHTAPGPDGIRAEEWNAVPADRKAEIFNAWMSTGETPEPLRQCRTIFVPKKDSPAGPGDYRPISIASIPLRHMHAILAKRLLACCPPDPRQRGFIRADGTLENTAVLDAVMGDCRKRLKECHVATLDFSKAFDTVSHKALLELLRARGLPKAFVDYIARLYETATTILAANGKTSDPVRVGKGVRQGDPLSPILFNIVMDSILDSLPAYVGYRLEGALISALAYADDVVLITGSQVGMTEVLKLVSRCAEQLGLRLNHSKSSVLSLVPDGHRKKLHYLTEKSFGVGRRKLRQATCVERWRYLGVDYSAAGCVTLEHDITEALNNITRAPLKPQQRLEMVRGHLVPRFMHGFVLGKIADDRLRMLDVQIRGAVRKWLRLPKDVPTAYFHAKVQDGGLGLPSLRAVVPELIVKRYGALDRSTWEAARAAARSDKIRKKLSWAKRQMRKYLHDTGGGSSTSEATHTADYWRESLYRSVDGFELRESSKTAASTKWLRERSGRYTGRDFVQFVHTHINALPSRVRTTRGRRNGTGSELNCRAGCMVRETTAHAIQQCHRTHGGRIERHNLVVRVFSEELARQGWHVEVEPKVVTSLGIRKPDIIAVRGEVGVIWDAQIVSGQRPLDDAHRTKRTKYGSDVELVEKVADKLGLPIGCVQATSCTLSWRGIWSRASVNEQRRLLGLGSSLFEWIPELVLRGSHTNWTRFNQLTTVKGRG

SEQ ID NO: 32855 - protein, 973 aa, Lysandra coridon
MVKRRWSDEELALLASTEAQLVTEKGKCTNIDLVARLPHLNRTVEAIKGQRRSQKYRSLVQMYLTNVPEASPNPEIPVAGCSTPTRNVAARPADSPGVAGESMARPADDPSVAVVVPPGVAETVSELLARAARRKSRSGPSAKAARRPHKTGNDERAHSARVSKRALRRMEYARVQELYKKNRGRAAAEVIDGQCRVVEHSLEDLEAYWRPIFEAVSGARGPTPEVLEAAKRKGQYGGEEARSHLWDPITMDEVRDTRLDLHTAPGPDGIRAEEWNAVPADRKAEIFNAWMSTGETPEPLRQCRTIFVPKKDSPAGPGDYRPISIASIPLRHMHAILAKRLLACCPPDPRQRGFIRADGTLENTAVLDAVMGDCRKRLKECHVATLDFSKAFDTVSHKALLELLRARGLPKAFVDYIARLYETATTILAANGKTSDPVRVGKGVRQGDPLSPILFNIVMDSILDSLPAYVGYRLEGALISALAYADDVVLITGSQVGMTEVLKLVSRCAEQLGLRLNHSKSSVLSLVPDGHRKKLHYLTEKSFGVGRRKLRQATCVERWRYLGVDYSAAGCVTLEHDITEALNNITRAPLKPQQRLEMVRGHLVPRFMHGFVLGKIADDRLRMLDVQIRGAVRKWLRLPKDVPTAYFHAKVQDGGLGLPSLRAVVPELIVKRYGALDRSTWEAARAAARSDKIRKKLSWAKRQMRKYLHDTGGGSSTSEATHTADYWRESLYRSVDGFELRESSKTAASTKWLRERSGRYTGRDFVQFVHTHINALPSRVRTTRGRRNGTGSELNCRAGCMVRETTAHAIQQCHRTHGGRIERHNLVVRVFSEELARQGWHVEVEPKVVTSLGIRKPDIIAVRGEVGVIWDAQIVSGQRPLDDAHRTKRTKYGSDVELVEKVADKLGLPIGCVQATSCTLSWRGIWSRASVNEQRRLLGLGSSLFEWIPELVLRGSHTNWTRFNQLTTVKGRG

SEQ ID NO: 32856 - protein, 1071 aa, Lysandra coridon
MTLLIRVRGGFGLAARFCPLKFIAQDDSKVNSLLGLPLEPSSRTLNSPDAERGDSDRRPEPSGWACLVCARTFTTKNGLGVHKRRAHPVLANTEAAPNMVKRRWSDEELALLASTEAQLVTEKGKCTNIDLVARLPHLNRTVEAIKGQRRSQKYRSLVQMYLTNVPEASPNPEIPVAGCSTPTRNVAARPADSPGVAGESMARPADDPSVAVVVPPGVAETVSELLARAARRKSRSGPSAKAARRPHKTGIDERAHSARVSKRALRRMEYARVQELYKKNRGRAAAEVIDGQCRVVEHSLEDLEAYWRPIFEAVSGARGPTPEVLEAAKRKGQYGGEEARSHLWDPITVDEVRDTRLDLHTAPGPDGIRAEEWNAVPADRKAEIFNAWMSTGETPEPLRQCRTIFVPKKDSPAGPGDYRPISIASIPLRHMHAVLAKRLLACCPPDPRQRGFIRADGTLENTAVLDAVMGDCRKRLKECHVATLDFSKAFDTVSHKALLELLRARGLPKAFVDYIARLYETATTILAANGKTSDPVRVGKGVRQGDPLSPILFNIVMDSILDSLPAYVGYRLEGALISALAYADDVVLITGSQVGMTEVLKLVSRCAEQLGLRLNHSKSSVLSLVPDGHRKKLHYLTEKSFGVGRRKLRQATCVERWRYLGVDYSAAGCVTLEHDITEALNNITRAPLKPQQRLEMVRGHLVPRFMHGFVLGKIADDRLRMLDVQIRGAVRKWLRLPKDVPTAYFHAKVQDGGLGLPSLRAVVPELIVKRYGALDRSTWEAARAAARSDKIRKKLSWAKRQMRKYLHDTGGGSSTSEATHTADYWRESLYRSVDGFELRESSKTAASTKWLRERSGRYTGRDFVQFVHTHINALPSRVRTTRGRRNGTGSELNCRAGCMVRETTAHAIQQCHRTHGGRIERHNLVVRVFSEELARQGWHVEVEPKVVTSLGIRKPDIIAVRGEVGVIWDAQIVSGQRPLDDAHRTKRTKYGSDVELVEKVADKLGLPIGCVQATSCTLSWRGIWSRASVNEQRRLLGLGSSLFEWIPELVLRGSHTNWTRFNQLTTVKGRG

SEQ ID NO: 32857 - protein, 973 aa, Lysandra coridon
MVKRRWSDEELALLASTEAQLVTEKGKCTNIDLVARLPHLNRTVEAIKGQRRSQKYRSLVQMYLTIVPEASPNPEIPVAGCSTPTRNVAARPADSPGVAGESMARPADDPSVAVVVPPGVAETVSELLARAARRKSRSGPSAKAARRPHKTGNDERAHSARVSKRALRRMEYARVQELYKKNRGRAAAEVIDGQCRVVEHSLEDLEAYWRPIFEAVSGARGPTPEVLEAAKRKGQYGGEEARSHLWDPITVDEVRDTRLDLHTAPGPDGIRAEEWNAVPADRKAEIFNAWMSTGETPEPLRQCRTIFVPKKDSPAGPGDYRPISIASIPLRHMHAILAKRLLACCPPDPRQRGFIRADGTLENTAVLDAVMGDCRKRLKECHVATLDFSKAFDTVSHKALLELLRARGLPKAFVDYIARLYETATTILAANGKTSDPVRVGKGVRQGDPLSPILFNIVMDSILDSLPAYVGYRLEGALISALAYADDVVLITGSQVGMTEVLKLVSRCAEQLGLRLNHSKSSVLSLVPDGHRKKLHYLTEKSFGVGRRKLRQATCVERWRYLGVDYSAAGCVTLEHDITEALNNITRAPLKPQQRLEMVRGHLVPRFMHGFVLGKIADDRLRMLDVQIRGAVRKWLRLPKDVPTAYFHAKVQDGGLGLPSLRAVVPELIVKRYGALDRSTWEAARAAARSDKIRKKLSWAKRQMRKYLHDTGGGSSTSEATHTADYWRESLYRSVDGFELRESSKTAASTKWLRERSGRYTGRDFVQFVHTHINALPSRVRTTRGRRNGTGSELNCRAGCMVRETTAHAIQQCHRTHGGRIERHNLVVRVFSEELARQGWHVEVEPKVVTSLGIRKPDIIAVRGEVGVIWDAQIVSGQRPLDDAHRTKRTKYGSDVELVEKVADKLGLPIGCVQATSCTLSWRGIWSRASVNEQRRLLGLGSSLFEWIPELVLRGSHTNWTRFNQLTTVKGRG

SEQ ID NO: 32858 - protein, 1094 aa, Aricia agestis
MALPTGAISPARSACRPSLCVSVWGLEKHRATGRIRVSGPLLLLIVLAQDSNREYSLRGLPLEPSSRTINSSDAERGDSDRRLEPSGWACLDCARTFTTKNGLGVHKRRAHPVLANIEAAPNVVKRRWSDEELALLAITEAQLVAEKGKCTNIDLVARLPHLNRTVEAIKGQRRSQKYRSLVQMYLTNVPEASPNPEILVAGSSSPTRNVAAQPADSPGVPRESMARPADDPSVAVVVPPGVAETVSELLARAARRKSRSGLSAKAARRLHKTGIEERAHSARVSKRALRRIEYARVQELYKKNRGRAATEVIDGQCRVVGHSLGDLEAFWRPIFEAVSGAQGSTPEVLEAARRKGQYGGAEARSHLWDPITVDEVRDTRLDLHTAPGPDGIRAEEWNAVPADRKAEIFNTWMSTGETPEPLRQCRTIFVPKKDSPAGPGDYRPISIASVPLRHMHAILAKRLLACCPPDPRQRGFVRADGTLENTAVLDAVMGDCRKRLKECHVATLDFSKAFDTVSHKALLELLRARGLPKAFIDYIARLYETATTILAVNGKTSDPVRVGKGVRQGDPLSPILFNIVMDSILDALPAYVGYRLEGALISALAYADDLVLITGSQAGMKEVLKLVDRCAEQLGLRLNHSKSSVLSLVPDGHRKKLHYLTEKSFGVGRRKLRQATCVERWRYLGVDYSAAGCVTLEQDIAQALNNITRAPLKPQQRLEMVRGHLVPRFLHGFVLGKIADDRLRMLDVQIRGAVRKWLRLPKDVPTAYFHAKVKDGGLGLPSLRAVVPELIVKRYGALDRSTWEAARAAARSEKIRKKLSWARRQMRRFSHDTEGGSSTSEATPTADYWRESLYRSVDGFEWRESSKTAASTKWLRERRRYTGRDFVQFVHTHINALPSRVRTTRGRRNGTGSELNCRAGCMVRETTAHAIQQCHRTHGGRIERHNLVVRVFSEEMARQGWHVEVEPKIVTSLGIRKPDIIAVKGEVGVIWDAQIVLGQRPLDDAHRTKRTKYGSDVELVEKVADKLGLPIGCVHATSCTLSWRGIWSRASVNEQRRLLGLGSSLFEWIPELVLRGSHTNWTRFNQLTTVKERG

SEQ ID NO: 32859 - protein, 934 aa, Plebejus argus
MVKRRWSDEELALLARTEAQLVTEKGKCTNVDLVARLPHLNKTVEAIKGQRRSQKYRSLVLAYLTNIPEASPNPEMFAAGSSSPARNVAAQPADSPGVTRESMARPADDPSVAVVVPPGVAETVSELLARAARRKSRSGLSAKAARRLHKTGVDKRAHSARVSKRTLRRIEYARVQELYKKNRGRAAAEVIDGQCRVVEHSLEDLEAYWRPIFEAVSGARGPTPEVLEAARRKGQYGGAEARSHLWDPITVDEVRDTRLDLHTAPGPDGIWAEEWNAVPADRKAEIFNTWMSTGETPEPLRQCRTIFVPKKDSPAGPGDYRPISIASIPLRHMHAILAKRLLACCPPDPRQRGFIRADGTLENTAVLDAVMGDCRKRLKECHVATLDFSKAFDTVSHKALLKLLRARGLPKAFVDYIARLYETASTILAANGKTSDPVRVGKGVRQGDPLSPILFNIVMDSILDSLPAYVGYRLEGALISALAYADDVVLITGSLVGMKEVLKLVERCAEQLGLRLNHSKSSVLSLVPDGHRKRLHYLTEKSFGVGRRKLRQATCVERWRYLGVDYSAAGCVALEQDINQALNNITRLEMVRGHLVPRFMHGFVLGKIADDRLRMLDVQIRGAVRKWLRLPKDVPTAYFHAKVQDGGLGLPSLRAIVPELIVKRYGNLDRSTWEAARAAARSEKIRKKLSWARKQLRKYFHDTEGGSSTSEATSTADYWRESLYRSVDGFELRESSKTAASTKWLRERSGRYTGRDFVQFVHTHINALPSRVRTTRGRRNGTGSELNCRAGCMVGETTAHTIQQCHRTHGGRIERHNLVVFAVRREVGVIWDAQIVSGQRPLDDAHRTKRTKYGSDEELVGKVADRLGLPIGCVQATSCTLSWRGVWSRASYNEQRRLLGLGSSLFEWIPELVLRGSHTNWTRFNQMNTVKGKG

SEQ ID NO: 32860 - protein, 1263 aa, Bursaphelenchus xylophilus
MMLLESQGNLAISTERRGSEYGVREGEAPADPNAPGVSGIPSESPERNNGNAEANEPMTVETRSEAQSARNTGKRAFWSQDETIRLIQEDKALRAVVDPTRLRRLGGDQYWIRLAEQYERVRLLVNRIYQLDLPQREAGAVKSKLVNRLPVELKNSDRRVWPRVGLAGVGSDVHESEMPETNERSEELGQSSGTPADAPAEAERVHVVDDTEASSPEDGSVVVEERFRQQFNHYRKVFMERNSTWRKPLKFPRKVPGTLWTQANSLIGDVLRSGVAISLHDLNKLAYAAACTVQHFLKEKDRLCLERERNWFAAREVETNSLLRYLNWIDVELARRRVSARQTTHQRWCSRQLKTRYGRERIADTGRLKELRSMLRDALAGVRKSVAKRKADRERKRAKFVPLRRYLEKGPEVEPQLDANRVKEYWAELVGADDRSDSRSITADWAHDLEVPVQTATPSKIQVWWKMALSKCKPNKAAGPDGLPGCVWKCLPNASNWLCTWLIKKLACSRIDTPRWLSEGRVVLLMKKGDPNDPANYRPIACLNTCYKLMTSVIERAIREQVTACPTLIPSEQVANRKGVWGCTHASIVDRLVTGTAAMSKGQNADLRVLFYDCKKAFDSVSRDHMFRVLDVAGVDRKIYYLLKSFTMNWTVRYELRRSGRVERSAPLRVKRGLLQGDSLSPTWFCLCIAPISHALRLRNPGPCIRQVAGHSDGGQVHVSHLFYMDDLKVYCTGEAAQVRAERLVPELFSQIGLCVNESKSAAAAGPSRTLRSSLPLLGVKDQYKYLGIESGFVANEASAYSRMQTTILAKVQSILDVEGHTVGQRRIAIRTVAFPGAAFILGNIILGDKQPNSAKADMLKLDMVIREKIRRKGLLHHSCANPRIYLSCKRGGLEWPSMFRTYCAAVAYSSAYLLTSGDPWVKRAQEHFVYGTLAAKNQVYKHLLYVLGELEIGRQVIEPPWGNDPKALARKLVLAIDTKIEENYLRDLRAMPRAGRFVNAESSAIDQENSHLWLEKGWINGKAYQHINSVIEGTLLEGVNPHNVLEKCRACGNRNADIIHITSGCERLRETIMKTRHDGATRWLYSALTEVDESLPRFHYTQQIDGLAIGNRLEIRYDIDVVTPNRPKHCRPDLVVFDKQRKEIFIVEVSVSWFTIVQKMYENKYCRYAVNSNHEYSEHCPYPPGVNLANELRVMYPQYVNGVKVLPLVITPTGHIHNEFVPHLRMLLQQSNVSKIVERIQRSVVLGTDYIIRTYFAMLRKH

SEQ ID NO: 32861 - protein, 1379 aa, Bursaphelenchus xylophilus
MLGSYASLDTLFCHALCSVWENPWEIPLMLRKFGNKSGPLLHKYEHKCYFQGGLRFYTRQQLPELGTLGGQDNTIPNKVPRLGALARRPSRNFTALNPKKRRPRAVTQSSGGSGELWRDAADHCPSDRMLPEPSNLRSPPTKRGRTESAPTESEPGPSGEQSTGAGAPGIPNENSSRANGNAGAQPSESVLARVQTQPTRVTGRVQRQNWSTDELARVCQEYRELKESTGGVEAGGPAVWFGKLSERYNRVIESVNRAYGLNLPARNWSSIRSKLQRDKAADRIFDKVWDRVVVNPDGETVILDDPENSSEQIEDHRIGEAASAAEPTTTASSPDTEWVIDDEFRENFNHFVATWMGKTRKVRKPIKFPRKVPEVLWKHANHLVAEHVANGTIRSLADLNRTVYAASCTVAHVLKLEDKKCAQREKDWFAAREAEIKNLSRYLNWIDVELTRRRQSQRLTPRQKRHVVELRLRYGRDRVADTTRLIELKSMLRDVLAMTRRSVMRRRADRDRKRGKFVPLRKYLESGESRDDPALRVDEIREYWAGIVGESQRSQSDAITAEWAQDCNVSAQEVTDEQLRVWWRMAVSKCKPNKAPGPDGIPGVSWKRLPCASDWLCTWLINALRSVRVNTPGWLAHGRVVLLYKKGDASDPANYRPIACLNTCYKLITSVIEKAIREQVSACPQLLPREQIANRKGVWGCTHASIVDRMVTGSARVDKGIPGGLRVLFYDCQKAFDSVLRDHMFKVLEVAKIDRKLLLLMKSLTMNWTVRYELRRSGHTERSNPLRVRRGLLQGDTLSPTWFCLCIAPISKALRDANPGPQFRPIPGRRDGVSVYVGHMFYMDDLKVYCAGERAQVAAERLVPELFSRIGMNINASKSAAASLSGENTTSSLPVLGVKDQYKYLGIESGFVAHEVAAYARMEKVILAKVSSILQVTQHTVGQRRHAIRTVAFPGAAFILANIILGDKRPATAASDMDRMDMEIRKLIRSRGILHAKCANPRMYLSCERGGLGWPSLRATYYHSVAYSAAYLLTCQDPWVCRAKDYFLSGRLKGKNQVYKHLLYIFKELGIGEDILSNPGENSRALAQKIALAIDTKLEEKYLRELAQMPRAGRWVDADSSVFDPKYSYLWLEKAWVNDKAYQHVNSVIEGTLLEGVNPHNVLEKCRACGEQNATIAHITNGCRILRETTMKQRHDGVARWLYSALTEVDSTLPRYHYTQPIEGLVRGERLEVRYDIDIPTPNMPRHCRPDVVIFDRLRQEILIAEVSVTWHSSVQLVYENKYNRYAVNSNHEYSESTPYPPGVNLANELRAMYPNFVRGVKVLPLVITPTGHLHREFVPHIQHILQQTKVSRHIERMQRAVVLGTDYIIRTYFAMPKR

SEQ ID NO: 32862 - protein, 1351 aa, Bursaphelenchus xylophilus
MLRKFGNKSGPLLHKYEHKCYFQGGLRFYTRQQLPELGTLGGQDNTIPNKVPRLGALARRPSRNFTALNPKKRRPRAVTQSSGGSGELWRDAADHCPSDRMLPEPSNLRSPPTKRGRTESAPTESEPGPSGEQSTGAGAPGIPNENSSRANGNAGAQPSESVLARVQTQPTRVTGRVQRQNWSTDELARVCQEYRELKESTGGVEAGGPAVWFGKLSERYNRVIESVNRAYGLNLPARNWSSIRSKLQRDKAADRIFDKVWDRVVVNPDGETVILDDPENSSEQIEDHRIGEAASAAEPTTTASSPDTEWVIDDEFRENFNHFVATWMGKTRKVRKPIKFPRKVPEVLWKHANHLVAEHVANGTIRSLADLNRTVYAASCTVAHVLKLEDKKCAQREKDWFAAREAEIKNLSRYLNWIDVELTRRRQSQRLTPRQKRHVVELRLRYGRDRVADTTRLIELKSMLRDVLAMTRRSVMRRRADRDRKRGKFVPLRKYLESGESRDDPALRVDEIREYWAGIVGESQRSQSDAITAEWAQDCNVSAQEVTDEQLRVWWRMAVSKCKPNKAPGPDGIPGVSWKRLPCASDWLCTWLINALRSVRVNTPGWLAHGRVVLLYKKGDASDPANYRPIACLNTCYKLITSVIEKAIREQVSACPQLLPREQIANRKGVWGCTHASIVDRMVTGSARVDKGIPGGLRVLFYDCQKAFDSVLRDHMFKVLEVAKIDRKLLLLMKSLTMNWTVRYELRRSGHTERSNPLRVRRGLLQGDTLSPTWFCLCIAPISKALRDANPGPQFRPIPGRRDGVSVYVGHMFYMDDLKVYCAGERAQVAAERLVPELFSRIGMNINASKSAAASLSGENTTSSLPVLGVKDQYKYLGIESGFVAHEVAAYARMEKVILAKVSSILQVTQHTVGQRRHAIRTVAFPGAAFILANIILGDKRPATAASDMDRMDMEIRKLIRSRGILHAKCANPRMYLSCERGGLGWPSLRATYYHSVAYSAAYLLTCQDPWVCRAKDYFLSGRLKGKNQVYKHLLYIFKELGIGEDILSNPGENSRALAQKIALAIDTKLEEKYLRELAQMPRAGRWVDADSSVFDPKYSYLWLEKAWVNDKAYQHVNSVIEGTLLEGVNPHNVLEKCRACGEQNATIAHITNGCRILRETTMKQRHDGVARWLYSALTEVDSTLPRYHYTQPIEGLVRGERLEVRYDIDIPTPNMPRHCRPDVVIFDRLRQEILIAEVSVTWHSSVQLVYENKYNRYAVNSNHEYSESTPYPPGVNLANELRAMYPNFVRGVKVLPLVITPTGHLHREFVPHIQHILQQTKVSRHIERMQRAVVLGTDYIIRTYFAMPKR

SEQ ID NO: 32863 - protein, 1251 aa, Bursaphelenchus xylophilus
MLPEPSNLRSPPTKRGRTESAPTESEPGPSGEQSTGAGAPGIPNENSSRANGNAGAQPSESVLARVQTQPTRVTGRVQRQNWSTDELARVCQEYRELKESTGGVEAGGPAVWFGKLSERYNRVIESVNRAYGLNLPARNWSSIRSKLQRDKAADRIFDKVWDRVVVNPDGETVILDDPENSSEQIEDHRIGEAASAAEPTTTASSPDTEWVIDDEFRENFNHFVATWMGKTRKVRKPIKFPRKVPEVLWKHANHLVAEHVANGTIRSLADLNRTVYAASCTVAHVLKLEDKKCAQREKDWFAAREAEIKNLSRYLNWIDVELTRRRQSQRLTPRQKRHVVELRLRYGRDRVADTTRLIELKSMLRDVLAMTRRSVMRRRADRDRKRGKFVPLRKYLESGESRDDPALRVDEIREYWAGIVGESQRSQSDAITAEWAQDCNVSAQEVTDEQLRVWWRMAVSKCKPNKAPGPDGIPGVSWKRLPCASDWLCTWLINALRSVRVNTPGWLAHGRVVLLYKKGDASDPANYRPIACLNTCYKLITSVIEKAIREQVSACPQLLPREQIANRKGVWGCTHASIVDRMVTGSARVDKGIPGGLRVLFYDCQKAFDSVLRDHMFKVLEVAKIDRKLLLLMKSLTMNWTVRYELRRSGHTERSNPLRVRRGLLQGDTLSPTWFCLCIAPISKALRDANPGPQFRPIPGRRDGVSVYVGHMFYMDDLKVYCAGERAQVAAERLVPELFSRIGMNINASKSAAASLSGENTTSSLPVLGVKDQYKYLGIESGFVAHEVAAYARMEKVILAKVSSILQVTQHTVGQRRHAIRTVAFPGAAFILANIILGDKRPATAASDMDRMDMEIRKLIRSRGILHAKCANPRMYLSCERGGLGWPSLRATYYHSVAYSAAYLLTCQDPWVCRAKDYFLSGRLKGKNQVYKHLLYIFKELGIGEDILSNPGENSRALAQKIALAIDTKLEEKYLRELAQMPRAGRWVDADSSVFDPKYSYLWLEKAWVNDKAYQHVNSVIEGTLLEGVNPHNVLEKCRACGEQNATIAHITNGCRILRETTMKQRHDGVARWLYSALTEVDSTLPRYHYTQPIEGLVRGERLEVRYDIDIPTPNMPRHCRPDVVIFDRLRQEILIAEVSVTWHSSVQLVYENKYNRYAVNSNHEYSESTPYPPGVNLANELRAMYPNFVRGVKVLPLVITPTGHLHREFVPHIQHILQQTKVSRHIERMQRAVVLGTDYIIRTYFAMPKR

SEQ ID NO: 32864 - protein, 892 aa, Poecilobdella manillensis
MSGLTTTIRGIIEATSSPKPGNPGKGDTKKDATHTETKEATRIQRLFRFSMKEAFRQITEVPSPKCEIAHEAIASHFAPPAPAPFTPSFTPSQPPNCSMSHDILAQDFTPSEVLAKLKKMGNTSPGPDKIRYKHWRKFDPEALVLATLFGKCRELLLVPSSWRTSRTVLLHKKGDQSDPGNWRPIALINTVAKLFTACLATRLTSLFTSESILAPQQKGFLPTEGCLEHNFVLQSIIEDAKRKSKDLAIAWLDLRNAFGSVPFNTIFESLSQHGFNLRTQSMIWELYRDSSTAFTTAEGPSPQFPVSSGVKQGCPLSPLIFNIAINSLIKGVAALSQSHGYPLFDLHHSILAYADDLVLTSNNRDHLHLMLLQVGDSATTLGLSFNPAKCATFHLSKAVVLDTTFTIQGGAPPALKEDEYYSYLGRPTGHQPFLSIKQTLEGMTSDMEKLEGSLLAPWQKIQATNTFLLPRLNYILKSGYVYKKDLKAFDERLTAMAKKWTWLPKRGSCEPLFISQNEGGLGLLPTRQMADIATVVQAHKFLNNKDSAIRELARNSLTTVTSSRARRPANNTEVASFLNGSMEGDLGLPSNDHSTFFARVRVATVELRKRVLFSWTPGVNTPFLQMGGHPVPFFQAEARLKRAVRKDFLVKLHGKKSQGGVSRCASQSALSNHFILKGTYCSFANWRFIHRARINVLATKSQPWVKDDRSCRKCGADNETLGHILCGCKPNLALATIRHNAIVDEIVKLIPATNLRLNQQVPLSLSPLRPDIVSFDLSSKQAVIIDVKCPFDYNADALERGRLEKFHKYQGIAQELRSLGFSVHVGAVVVGALGSFDDENLTSFKALGIRGLRAKELSKRVVCSNITHSRLIYNSHTHHQPRPAGPGKAQEN

SEQ ID NO: 32865 - protein, 933 aa, Tuta absoluta
MFKCPHCSGSFSGQRGLNIHIGHKHKDCRVPLQTSAVGPTSAVPDSSLNCCLENLIDLKKATKVLRHIPKGARCMAAAKLRTLIRSCLKNNSVEDWFRLLSFSYSALRAPEASGSGSLTSKVKRNIESDTYVPNGCDWAGKSPSLIKTIESKVHEGDLRSAVRLLTSNDSFAVCDSDNLAALRSKHPSPSRALNFPAAPNSDTPALKVKVEDVSQALTSFYNSSAGGLDGIRPAHLKQLVSASAADNGSSLIEELTNLCNFLLEGRLNPSVCPFLYGASLCALSKKDGGIRPIAVGSVFRRLVAKVGCRAVREEMASYLFPNQLGFGTQLGCEAAIHATRAFASDPANSDSVILKLDIKNAFNSLERDVLLQEARDKIPSLYHFLSQLYGSASNLYFGDKLILSEVGAQQGDPLGPLVFSLAIHKIIIQLESSLNIWYLDDGTTGGKPNVVERDLALLIPLLRQVGLEVSTAKCEFFSASSDRSLFDRFSRLIPGLRELDTGNFTLLGSPIFPAGVPQAIEEKRRLLEASRERLKGLSAHVALILLRVCFAIPKVTYLLRTSPTWMYPEEVSLFDVTLRDTVVSVLNVALDDRQWSQAALPVRHGGLGIRCMQDVGVPAFLASVHGVTKLVATILPLYGDELSIPFADGALSVWLARNPGASLPLDVGSQRAWDDIGAKGVSDHLLEAATGVNVARLRAVTQPESGAWLHALPSPHMGTLLDSDSLRVAVALRLGCNVCEPHLCVCGSMVEANGHHALSCSRCAGRFSRHHALNDIIRRALVSAQVPSVLEPPGLSRNDGKRPDGLSLVPWKCGKCLMWDATCVSTYAASHLSGTMRAPGAAAEGAASRKRDKYSVLSANYNFVPFAVETAGCWCNEAKAFIAELGSRLRERGGDPRSGSFLVQRLAMAIQRGNAASVMGTFAPGSTKSGLCE

SEQ ID NO: 32866 - protein, 933 aa, Tuta absoluta
MFKCPHCSGSFSGQRGLNIHIGHKHKDCRVPLQTSAVGPTSAVPDSSLNCCLENLIDLKKATKVLRHIPKGARCMAAAKLRTLIRSCLKNNSVEDWFRLLSFSYSALRAPEASGSGSLTSKVKRNIESDTYVPNGCDWAGKSPSLIKTIESKVHEGDLRSAVRLLTSNDSFAVCDSDNLAALRSKHPSPSRALNFPAAPNSDTPALKVKVEDVSQALTSFYNSSAGGLDGIRPAHLKQLVSASAADNGSSLIEELTNLCNFLLEGRLNPSVCPFLYGASLCALSKKDGGIRPIAVGSVFRRLVAKVGCRAVREEMASYLCPNQLGFGTQLGCEAAIHATRAFASDPAYTDSVILKLDIKNAFNSLERDVLLQEARDKIPSLYHFLSQLYGSASNLYFGDKLILSEVGAQQGDPLGPLVFSLAIHKIIIQLESSLNIWYLDDGTIGGKPNVVERDLALLIPLLRQVGLEVSTAKCEFFSASSDRSLFDRFSRLIPGLRELDTGNFTLLGSPIFPAGVPQAIEEKRRLLEASRERLKGLSAHVALILLRVCFAIPKVTYLLRTSPTWMYPEEVSLFDVTLRDTVVSVLNVALDDRQWSQAALPVRHGGLGIRCMQDVGVPAFLASVHGVTKLVATILPLYGDELSIPFADGALSVWLARNPGASLPLDVGSQRAWDDIGAKGVSDHLLEAATGVNVARLRAVTQPESGAWLHALPSPHMGTLLDSDSLRVAVALRLGCNVCEPHLCVCGSMVEANGHHALSCSRCAGRFSRHHALNDIIRRALVSAQVPSVLEPPGLSRNDGKRPDGLSLVPWKCGKCLMWDATCVSTYAASHLSGTMRAPGAAAEGAASRKRDKYSVLSANYNFVPFAVETAGCWCNEAKAFIAELGSRLRERGGDPRSGSFLVQRLAMAIQRGNAASVMGTFAPGSTKSGLCE

SEQ ID NO: 32867 - protein, 949 aa, Tuta absoluta
MSSVMLTCPYCPSSSKQFTQRGLSIHIGHKHKEKRSLSQASTGVLASQAPPPVSATPAPNPTLSCSLEHLINFKKSTRVLRHIPKGARSLAAAKLCSLIRSCLETNGVDEWFQLLSFSYTALRTPEASGSGSLTAKVKRNIVCDGCISSGGEMISKAPSLTKTIEAKVHEGDLRSAVRLLTSEDSFAACDQANLASLKSKHPSPTRELSFSPASDCNITALKVKVEEVALALGSFYNSSAGGLDGLRPAHLKELVSVSAADNGASLLEELTKMCNFLLEGRLNPLVCPYLYGASLCALKKKDGGIRPIAVGSIFRRLVAKVGCRSVRGEMAAYLCPTQLGFGTQLGCEAAIHATRAFATDPGNSDDVILKLDIQNAFNSLDRDSLLREARDKIPSLYSFLFQLYGAPSNLFFGDSLILSQVGAQQGDPLGPLVFSLAIQKIITELESPLNIWYLDDGTIGGKPDVVERDLAFLIPRLKEIGLVVSTAKCEIFSSGLDSNSLVSRFDSLIPGIKVLSPASFTLLGAPIFPAGVPHAILEKRRMLEAARERLKSLSAHVALILLRVCFAIPKVTYLLRTSPTWICPEEVSLFDGSLRDTVVNILNVSLDDVQWSQAALPVRHGGLSIRCMQNVGLPAFLASVHGVTDLVAAILPVFGGRVGIPFADSAISVWTNRNPGASFPQNVSSQRAWDDVGAKSALDLLIGSASGVDVARLRAVSQPESGAWLQALPSPHMGTLLDDDSLRVAVALRLGCNVCEPHLCVCGSMVEANGHHALSCGRCAGRFPRHHALNDILRRALISAQIPCVLEPPGLSRTDGKRPDGLTLVPWKCGKCLMWDATCVSTYAACHISSTMRVHAAAAEAAADKKREKYSSLSQNYNFIPFAVETAGCWCRDAKCFIAELGSRLRDRGADSRAGSFLVQRLAIAIQRGNAASVMGTFAPGSTRGGLFD

SEQ ID NO: 32868 - protein, 949 aa, Tuta absoluta
MSSVMLTCPYCPSSSKQFTQRGLSIHIGHKHKEKRSLSQASTGVLASQAPPPVSATPAPNPTLSCSLEHLINFKKSTRVLRHIPKGARSLAAAKLCSLIRSCLETNGVDEWFQLLSFSYTALRTPEASGSGSLTAKVKRNIVCDGCISSGGEMISKAPSLTKTIEAKVHEGDLRSAVRLLTSEDSFAACDQANLASLKSKHPSPTRELSFSPASDCNITALKVKVEEVALALGSFYNSSAGGLDGLRPAHLKELVSVSAADNGASLLEELTKMCNFLLEGRLNPLVCPYLYGASLCALKKKDGGIRPIAVGSIFRRLVAKVGCRSVRGEMAAYLCPTQLGFGTQLGCEAAIHATRAFATDPGNSDDVILKLDIQNAFNSLDRDSLLREARDKIPSLYSFLFQLYGAPSNLFFGDSLISSQVGAQQGDPLGPLVFSLAIQKIITELESPLNIWYLDDGTIGGKPDVVERDLAFLIPRLKEIGLVVSTAKCEIFSSGLDSNSLVSRFDSLIPGIKVLSPASFTLLGAPIFPAGVPHAILEKRRMLEAARERLKSLSAHVALILLRVCFAIPKVTYLLRTSPTWICPEEVSLFDGSLRDTVVNILNVSLDDVQWSQAALPVRHGGLGIRCMQDVGLPAFLASVHGVTDLVAAILPVFGGRVGIPFADSAISVWTNRNPGASFPQNVSSQRAWDEVGAKSALDLLIGSASGVDVARLRAVSQPESGAWLQALPSPHMGTLLDDDSLRVAVALRLGCNVCEPHLCVCGSMVEANGHHALSCGRCAGRFPRHHALNDILRRALISAQIPCVLEPPGLSRTDGKRPDGLTLVPWKCGKCLMWDATCVSTYAACHISSTMRVHAAAAEAAADKKREKYSSLSQNYNFIPFAVETAGCWCRDAKCFIAELGSRLRDRGADSRAGSFLVQRLAIAIQRGNAASVMGTFAPGSTSGGLFD

SEQ ID NO: 32869 - protein, 797 aa, Tuta absoluta
MISKAPSLTKTIEAKVHEGDLRSAVRLLTSEDSFAACDQANLASLKSKHPSPTRELSFSPASDCNITALKVKAEEVALALGSFYNSSAGGLDGLRPAHLKELVSVSAADNGASLLEELTKMCNFLLEGRLNPLVCPYLYGASLCALKKKDGGIRPIAVGSIFRRLVAKVGCRSVRGEMAAYLCPTQLGFGTQLGCEAAIHATRAFATDPGNSDDVILKLDIQNAFNSLDRDSLLREARDKIPSLYSFLFQLYGAPSNLFFGDSLILSQVGAQQGDPLGPLVFSLAIQKIITELESPLNIWYLDDGTIGGKPDVVERDLAFLIPRLKEIGLVVSTAKCEIFSSGLDSNSLVSRFDSLIPGIKVLSPASFTLLGAPIFPAGVPHAILEKRRMLETARERLKSLSAHVALILLRVCFAIPKVTYLLRTSPTWICPEEVSLFDGSLRDTVVNILNVSLDDVQWSQAALPVRHGGLGIRCMQDVGLPAFLASVHGVTDLVAAILPVFGGRVGIPFADSAISVWTNRNPGASFPQNVSSQRAWDDVGAKSALDLLIGSASGVDVARLRAVSQPESGAWLQALPSPHMGTLLDDDSLRVAVALRLGCNVCEPHLCVCGSMVEANGHHALSCGRCAGRFPRHHALNDILRRALISAQIPCVLEPPGLSRTDGKRPDGLTLVPWKCGKCLMWDATCVSTYAACHISSTMRVHAAAAEAAADKKREKYSSLSQNYNFIPFAVETAGCWCRDAKCFIAELGSRLRDRGADSRAGSFLVQRLAIAIQRGNAASVMGTFAPGSTRGGLFD

SEQ ID NO: 32870 - protein, 949 aa, Tuta absoluta
MSSVMLTCPYCPSSSKQFTQRGLSIHIGHKHKEKRSLSQASTGVLASQAPPPVSATPAPNPTLSCSLEHLINFKKSTRVLRHIPKGARSLAAAKLCSLIRSCLETNGVDEWFQLLSFSYTALRTPEASGSGSLTAKVKRNIVCDGCISSGGEMISKAPSLTKTIEAKVHEGDLRSAVRLLTSEDSFAACDQANLASLKSKHPSPTRELSFSPASDCNITALKVKVEEVALALGSFYNSSAGGLDGLRPAHLKELVSVSAADNGASLLEELTKMCNFLLEGRLNPLVCPYLYGASLCALKKKDGGIRPIAVGSIFRRLVAKVGCRSVRGEMAAYLCPTQLGFGTQLGCEAAIHATRAFATDPGNSDDVILKLDIQNAFNSLDRDSLLREARDKIPSLYSFLFQLYGAPSNLFFGDSLISSQVGAQQGDPLGPLVFSLAIQKIITELESPLNIWYLDDGTIGGKPDVVERDLAFLIPRLKEIGLVVSTAKCEIFSSGLDSNSLVSRFDSLIPGIKVLSPASFTLLGAPIFPAGVPHAILEKRRMLEAARERLKSLSAHVALILLRVCFAIPKVTYLLRTSPTWICPEEVSLFDGSLRDTVVNILNVSLDDVQWSQAALPVRHGGLGIRCMQDVGLPAFLASVHGVTDLVAAILPVFGGRVGVPFADSAISVWTNRNPGASFPQNVSSQRAWDEVGAKSALDLLIGSASGVDVARLRAVSQPESGAWLQALPSPHMGTLLDDDSLRVAVALRLGCNVCEPHLCVCGSMVEANGHHALSCGRCAGRFPRHHALNDILRRALISAQIPCVLEPPGLSRTDGKRPDGLTLVPWKCGKCLMWDATCVSTYAACHISSTMRVHAAAAEAAADKKREKYSSLSQNYNFIPFAVETAGCWCRDAKCFIAELGSRLRDRGADSRAGSFLVQRLAIAIQRGNAASVMGTFAPGSTSGGLFD

SEQ ID NO: 32871 - protein, 1206 aa, Alatina alata
MMNSNNNESLRGNGYGGTNPTISSPGRSRRGEIENDPEQSEAGRQQATVPAPLAQGGDAPFVEQPHLEMATRAQNPPNRGRTDRRNKWTKESRLEIWRCYTLADGSTKGFRKRMHQIWLNRGNPRNTTEQTLASQVLEIKNKNHLTPREREQAARSVQNNDTQNELETMIESTPPEVPQTDPATNNENQETEAQRGEQQTPERTTPPQQIVIEHDTTEQIEGPPPPEEDTLATNEPPLTPEEERTIQEIKFKFELYKDRDVLAPVQTLKSQKHYKLKKAAEEINKCLKYINTNNISETNTLIYSAAILTAERMGVKPNSHNNNRKQRKDPPWLFRLKKKQDLLRKHLSWITEWKNENLKNHEKKVELQRKYKTSLRGLIPTEEMLKQRLQACSSKIRRFQDRVKGYHQNNLFHSNQRKLYAELRGDNTQQDSPDPEQSIEFWSNIWSVEVEHKRNAEWVNETRERHKNIERDSEFEITLGKLRKQIKKIPNWKAPGPDQVQGYFLKTFTSLHPRIADQLQTWVRQGQVPEWMTLGRTVLIQKDKGKGNISSNYRPITCLPLMWKLLTGMINEKIYEHLDKNDLLPKEQKGGRRGSRGTKDHLLVDKMIMRNAKSREKSLSMGFIDYKKAFDMIPHSWLLECMEMYGISQNIINLIRNSMEHWRVELTANNNKLGEVRIKRGIFQGDALSPLLFILALIPLSETLNEVDAGYSLNRKVKVNHLLFMDDLKLYGKNKEQLTTLINTTHEISRDIKMVFGLDKCGIIHMVGGQVKHTEGVEVDPDEAIKEIDEGGYKYLGVLEYDNILHDKMKDKIRAEYLKRVRLVLKSKLTSKNSVMAINTWAVPLIRYAAGVIKWTKLERQKLDTKTRKLFTIYGSLHPRSCTDRLYLKREQGGRGLLSVEECIDSECNALGKYTKDHQDAIMREVWMTGTLKHAQDPEQLKQQKATERKEGWRGKQMAGQYLRQMENIQAKESWNWLKNGDLKRETEGTILAAQEQALRTKSILRKIEQRTDVNPKCRMCGQKDETINHIISECPKLAQREYKRRHDKVAKVVHWTICKKYGLEATDKWFQHVPETVQENDQAKLLWDYNIQTDQEIKARRPDLVLKDKGSNTTYLIDVAIPYDTRIKDKQVEKILKYQDLKIQVERCWQTTAKVVPIVMGALGAQPPDLKQFLKVIGCDKLFIGTIQKSVLLGTAHIIRKVLGE

SEQ ID NO: 32872 - protein, 823 aa, Alatina alata
MLKQRLQACSSKIRRFQDRVKGYHQNNLFHSNQRKLYAELRGDNTQQDSPDPEQSIEFWSNIWSVEVEHKRNAEWVNETRERHKNIERDSEFEITLGKLRKQIKKICNWKAPGPDQVQGYFLKTFTSLHPRIADQLQTWVRQGQVPEWMTLGRTVLIQKDKGKGNISSNYRPITCLPLMWKLLTGMINEKIYEHLDKNDLLPKEQKGGRRGSRGTKDHLLVDKMIMRNAKSHKKSLSMGFIDYKKAFDMIPHSWLLECMEMYGISQNIINLIRNSMEHWRVELTANNKKLGEVRIKRGIFQGDALSPLLFILALIPLSETLNEVDAGYSLNRKVKVNHLLFMDDLKLYGKNKEELTTLINTTHEISRDIKMVFGLDKCGIIHMVGGQVKHTEGVEVDPDEAIKEIDEGGYKYLGVLEYDNILHDKMKDKIRAEYLKRVRLVLKSKLTSKNSVMAINTWAVPLIRYAAGVIKWTKLERQKLDTKTRKLFTIYGSLHPRSCTDRLYLKREQGGRGLLSVEECIDSECNALGKYTKDHQDGIMREVWMTGTLKHAQDPEQLKQQKATERKEGWRGKQMAGQYLRQMENIQAKESWNWLKNGDLKRETEGTILAAQEQALRTKSILRKIEQRADVNPKCRMCGQKDETINHIISECPKLAQREYKRRHDKVAKVVHWTICKKYGLEATDKWFQHVPETVQENDQAKLLWDYNIQTDQEIEARRPDLVLKDKGSNTTYLIDVAIPYDTRIEDKQVEKILKYQDLKIQVERCWQTTAKVVPIVMGALGAQPPDLKQFLKVIGCDKLFIGTIQKSVLLGTAHIIRKVLGE

SEQ ID NO: 32873 - protein, 1162 aa, Hycleus cichorii
MEDRVLVCDCGKSYTSRESLQQHRRYYCSSSRNDNSDNTCSLCDRYFNSYAGLRQHQRKAHPFEYNQELAESDNRQNRPWSSLEVLHMVQEELGYGGININKYLSTIFEDRSPQMIRNYRKTKNYQQVLERVRADREESSGVGVGSDERPQERASSPQPRQERPSATAENDNEVNEVQDLPAASPMPPGLSLFDRNQRLRHLLRTKFGGDNADSELGFSSGADASSGAFALHGRPPLSPEIVVTNYGCLSPEVSMDGPANRYTTNTAVMPPFAAPVTEGSVVPPGASRSFALVGPTEATHNPDDPVLKYLIDCSREPSTDKTIVRFIKNLLDAGGDVSRCVDDFLQLIYSRCSGGGRRHADGAPDNSDRIPSTTKKKYGGAAERASMFKRAQQMYNKNRSALASHILSDTLGRPVAEYAKIEDIESTYKTIFESPEGIDNEDIIDFKEHDLQIYAPISAEEVRAVLARRSPDTAGPDGVTLTAIKKIPTMYLTALFNAMLYTSYCPDNLKTCRTTMIPKNGADLGCVDGWRPITVTSIIIRLMHKILASRFQNLPFHHNQRGFMSIDGTLANTMVLQWAIKEMRKNLQQHSVTTIDLRKAFDTISHTSLRRAMLRFRVDEKIIRFIMNSYDNSTTVITCGGKSTNPIHLRRGVKQGDPLSPYLFNLVMDELIGEIEKSGFGLQLGSDRLSVLAYADDLILFSSTPAEAQRVVRLCEKFLKKRQMEINAEKCTSLTAKILPARKKLYISTKPAIYANGGLIPPIDVLQQFKYLGFKYTYMGVERPDGATLQRELELVGRAPLKPFQKLNIIKDYVVTRHLYALQTPAVTIKQLDGYDKLVRNKVKQILHLPKQSTNSFLYAPLRMGGLGICCYRTKIPIIMKNRLQNLQQHSDPILSNLFVSEFLQGITERLDYMGRDVGDAPRAEANYWSSRLEASVLGSGISEVRHLFQSSSWVYSPPSYWSGRDYIGAIHVRSNLLPTAGGLHNPSGHRACRAGCNRNETMCHVLQRCPSTHWKRIQRHDNVVRLLSEFAAKRGWNVEIEPRFRNKEGLLRKPDLLMVKQDTAVLCDVAIHWEQGDSLSEACQQKFIYYNDPNILDGVKSKYPGCSVSILPFIMGVRGSWSPSNKRFNDVLSLSVGEKLAIVSSVLKGGYLIHQWFNINT

SEQ ID NO: 32874 - protein, 1162 aa, Hycleus phaleratus
MENGCYICECGKSYSGREPLQQHRRYYCSAERSDNADNICSLCNRTFNSYAGLRQHQRKAHPLEYNQEMADSDNRQNRPWSSLEVLHMVQEELGFGGININKYLSTIFEDRSPQMIRNYRKTKSYQSVLERVRADREESARVGVGLGSRPLRGGPSAQQSRHDLSEAAGSCGGAGAVLGPPTAPAVSPGQPSFDREERLRRVWQRKFGGVGAGSESMVSGDTASSSAVVVPSRHMPLSPEIVVANYGCLSAENSMDGLPNYNTCGGAMVASLVAPVPVVDIVHPAATGVPALAGSTAAVHGPDDCVLDYLVNCSKEPSTDKVVVRFIKNLLDDLSGASGYIDDFLQIIYSKCSNKGPRIATGASGNVTNTPSTVKKKYGGAADRASMFKRAQQMYNKNRSALASHILSDTLGQPVAEYAEIEAIESTYKAIFESPESTDLEEIENYKEHDLQMYKPISSDEVRAVLARRSPDTAGPDGVTLASIKRIPTIYLTVLFNAMLYTSHYPECLKVCRTTMIPKNGADLGCVDGWRPITVTSVIIRVMHKVLASRFQNLPFHYNQRGFMSIDGTLANTMVLQWAIKEMRKNLQQHSITTIDLRKAFDTVSHSSLRRAMLRFKINEKIIRFIMNGYHNATTVITCGKKSTNPIYLRRGVKQGDPLSPYLFNLVMDELIEGIEKSGFGLRLGNDRLSVLAYADDLILFSSTSAEAQRVVRLCERFLRKRQMEINADKCTSLTAKILPARKKLYISLKATIYANGGLIPAIDVLQQFKYLGFKYTYMGVERPDGATLRRELELVGRAPLKPFQKLNIIKDYVVTRHLYALQTPAVTIKQLESYDKLVRNKIKQILHLPKQSTNSFLYAPLRMGGLGICCYRTKIPIIMKNRLNNLQQRSDPILNSLFISSFLQGITEKLDYMNRDVGDAARAESNYWSSKLEASVLGGGISEVRHLFQSSSWVYNPPNYWSGRDYIGAIHVRTNLLPTAGGLQNPSGHRACRAGCNRNETMCHVLQRCPSTHWKRIQRHDNVVRLLSEFATKRGWSVEVEPRLRNKDGLLRKPDLLLVKHDTAVLCDVAIHWEQGDSLSEACQQKLTYYNDPKIIDGIKSKYPGCNVRILPFIMGVRGSWSPTNKHFNDALRLSVGERLAIVSSVLKGGYLIHQYFNIST

SEQ ID NO: 32875 - protein, 1162 aa, Hycleus cichorii
METGSYNCECGKSYPSRESLQQHRRYYCSAERSENSDNICSLCNRLFNSYAGLRQHQRKAHPLEYNQEMADSDNRQNRPWSSLEVLHMVQEELGYNGVNINMYLSTIFEDRSPLMIRNYRKTKNYRSVLERVRADREESAGVGLGSNNQPSQRASSAQQNQHHSDETADTCDRVDAALSPPTVPSMSAGSRSFDRERRLRRVLQRRFASGGTDSELVVPGDAVPPSDGVVPPGHVPLSPEILVTECGCLSTETSMDSSLNYNTCGVALVVPSVVSGPVVGVVPPAATDVPALAGSATVLRDPDDPVLNYLIDCSREPSTDKVIVRFIKNLLGDLGDAPVYIDNFLQLIYSRCCRDGSRNAAGASGGGANIPSAVKKKYGGAAGRASMFKRAQQMYNKNRSALASHVLSDTLGQPVAEYADIEAIESAYKAIFESPESEDAEEIDKFKERDLQIYKPISTEEVRAVLARRSPDTPGPDGITLTSIKKIPAIYLTALFNAMLYTSHYPDSLKVCRTTMIPKNGADLGCVDGWRPITVTSIIIRVMHKVLASRFQNLPFHYNQRGFMSIDGTLANTMVLQWAIKEMRKNLQQHSITSIDLRKAFDTVSHSSLRRAMLRFKIHEKMIRFIMNGYHDATTVISCGKRSTNPIRLCRGVKQGDPLSPYLFNLVMDELIEGIEKSGFGLQLGSDRLSVLAYADDLILFSSTPAEAQRVVRLCERFLRKRQMEINAAKCTSLTAKVLPARKKLYISSKPAIYANGGLIPAIDVLQQFKYLGFKYTYMGVERPDGATLRRELELVGRAPLKPFQKLSIIRDYVVTRHLYALQTPAVTIKQLESYDKLVRNKIKQILHLPKQSTNSFLYAPLRMGGLGICCYRTKIPIILKNRLKNLQQHSDPILNSLFVSSFLQDISEKLDYMNRDVGDAARAEANYWSSKLEASVLGGGISEVRHLFQSSSWVYNPPNYWSGRDYIGAIHVRTNLLPTAGGLQNPSGHRACRAGCNRNETMCHVLQRCPSTHWKRIQRHDNVVRLLSEFSAKRGWSVEVEPRLRNKDGLLRKPDLLLVKQDTAVLCDVAIHWEQGDSLSEACQQKFTYYNDPKIIDGVKSKYPGCNVSILPFIMGVRGSWSPTNRHFNDVFRLSVGEKLAIVSSVLKGGYLIHQWFNIST

SEQ ID NO: 32876 - protein, 1271 aa, Chelonus insularis
MSHLSREMSGRDDSPSSDSTVILISNCRSSRDTIRTSRTNPVRVRVASASSQSSVASTITSTLTATNSVVVSSLSANAALLCSERRQAKARWSDEDLRRMAIAELEAPVSVRSSINDFLVRTVHFESTRGLEAIKSMRKRDKYRQLLEELRARTILEPGCDPVEVHEVGSDLPVSLMAPSSILHAPASRPVPVPSSSPLDAVNNTEIHHTDARSVPPTVDYEIVHPYQCPDCQRSFPSVRSLSQHKRHAHRLVPSSEDRQESALDYHCPLCSRSFVSAIALGQHKRHTHPVEANDDIRLATRNIKWKDEELRMLVAAELQAGPEHAGSINNYLTSLNIVARTAAAITLERGSARYRNLRTEMLALRSSLLDPPPSGSVDSISQANVAVPQTPTIVDTVVGSDHGSSLKSFHDWLLDTKNILMNSSSRPTGLEDILKAVDAVLQGENPEFYLLEWSKAVFPETRPYQPRKSKSNSSETVVSRSHKRRREYARLQTLWSKNRSKAARLVLEGDHSQSCVLSLEEQEAFWRPVFEDEGSQWVDNENQNVSACGLEDACVPIEASEVQRIRPKLRSAPGPDGLSAKEWTSKVDPWVAATIMNILLLWGHVPAYWRDSRTILIPKKDGAQDPALFRPISISSVILRHLHRILADRVISRDVFDKRQRGFIHADGTAENIAILAAILDKARSNKKDIHIVSIDAQKAFDTVSHGAIDSVLCKRGFSSIIRAYFQNLYRESKTHLEVNGALSSSIRPARGVRQGDPFSSVAFNLVMDEVLRVVDPNVGFDLDGVRVNALSFADDLCLIASTKTGMQRVLDKISEAMTAHGLTAAPHKCHAVSILLAGKVGKMKVITEPLFTINAHWIKQVGVDESWKHLGINFTIKGPASPKIELDQSLERITRAPLKPQQRLIILRFYLIPKFMHSLVLGKISFGLLERLDRTVRYYVRKWTKLPHDVTCAFFHAPVSEGGLGILSFSSRIPELVKQRISGLSSSNFDCVKRACSSKWAQGRINWTQGQKFPHKDWATKLHQSVDGSELRECNKSPLSSNWLYNSVGIPPRDWLAYLKVRINALPSRMRTTRGFRASLMDRNCRAHCMVTETTAHIVQQCHRTHGGRIWRHDAIVKYLHNLLRDKMFRVWVEPHVMTSVGLRKPDLVAERDGMLYIIDVQIVSGSGNLQLKHVQKRDYYASNNDLISSVAGFAHLPRSRVKTSTLTISWRGVWASSSAAFLLGLGLSKKKLAGITTRVLLGSFLNFIRFNSMTTTADHNTWPFRPRN

SEQ ID NO: 32877 - protein, 1281 aa, Chelonus insularis
MSQQPNTLATGLTGEDSPPSALQSSSSCRSTGAAIRTNKPINVRVSVVSTTSQNSVASTTLSSATSSSSDTVTLSTTQTPPLASGTRPKASSKVRWDNEDLRRMALVELNAPASAKGSINDYIINSVQFSTYRGIEAIKSVRRRDKYRKLLAELRDEALSTKDNVHTSSPHTEEPIIIQAVNVDQVCPFVEQSSASASLQPLLSATSSTVQVATNSQIPVSPPIDLPYCCTLCNRSFPSLRSLSQHKRHAKHKSPEPVSREEILALPPEFQCHICQRSFQTIIGLGQHKRQTHPVQANEEIVLASRNIRWQDEDLRRLAHAELQAGQDHISDMNLYLHSLGIVSRDSNAIMNLRRSTKYRNLRSLLQLEAGTSDDLLEDNDILTNSPRCNTDPVSISSPNTDDVPDTPECLSSKQSFHKWLTNARKVLLTSSKQPTGSDSIMSAIDLVLNGSDPEPALLQWFREAFPRTKEYKPVRARPTGSSRLSTSRDHQRRKDYARLQTLWRKNRTKAASLVLDGDSNQGSSLSLEKQEAFWKPIFESGGDSTEFAQISSDLPVLRDDTCAPIDPSEVQRIRPKVRSAPGPDGLSAKDWVSDLDPYIAAILMNILLLWGHVPSIWRDSRTILIPKKEGAQDPALFRPISISSVILRHLHRILADRVISRNIFDTRQRGFIHADGTAENVAVLAAILSKAQCDRKNLHVVSIDAQKAFDTVSHNAIDAVLKKRGFSDIIRTYFMNLYKESYTRLEVNGVFSTQIHPTRGVRQGDPFSSVAFNLIMDEVLGVIDPFIGFDLDGAIVNALCFADDLSLVASTRDGMQSMLNKVSNAMAAHGLTAAPHKCSAVSLLLAGKVSKMKVVSEPLFEINSRPIQQMGVEDSWRHLGVNFTIKGPKSPHVDLNEMLIKITKAPLKPQQRLYLLRTHLIPRFIHSLVLGKVSFGLLNRLDRSVRLYIKKWTKLPHDTPSAFFHAPVLEGGLGILSFSTRIPELVHQRLSSLSTSTFECARKASVSRWANDRREWSSGQEFPNCEWSSKLHISVDGSELMQCKDSNLSSSWIYASMGIPARDWIAYIKVRINALPSRVRTSRGPRSLLINRNCRALCLSTESTAHIIQQCHRTHGGRVMRHDAIVRYLADLLKDRLFRVWVEPKFKTSVGLRKPDIVAEKDGIAYIIDAQVVSGSGDLAQKHLAKRDYYALNNDVLTSVADLTCLPRNRVRTSTLTVSWRGIWAKSSAAFLLGLGLPKKKLVGITTRVLLGSYLNFVRFNSMTTVAAHNIWHHRPPRPT

SEQ ID NO: 32878 - protein, 955 aa, Ancistrocerus nigricornis
MHKDLYDRRVALSIVNRKAPWSEEELSLLARQEATLTLSGEKFLNQALHRSFPLRTIEAIKGQRKRPSYKEKVLSALALLKPSPTPSNAVPVMVCEVGALGRAIAAEISSLAPLDGNDYDVAHLSAISTNLLTWSHAEILRELECYLLKVLPPQPPRVQGERTSHDHLAKSLTKRRARRIEYAKVQRHWKANRFDCIRAVLKRKTSSRTPKQDVMVPFWRTVLTDGSDSTPGSTKPPEVFSDLWGPIKAAEIKACFPGLSSAPGPDGLTPRQLQAIPLGVLLRVLNIIMFVGKLPSHLLESRTILIPKKEEACEPGDFRPITISSVLTRTFHKILAKRLMSKIEIDKRQKAFMPVDGCSQNVFMLDLILRTRRQEFKSLYMASVDIAKAFDSVSHNTIYDTLRTVGLPDAMIEYIRDLYSRSTTRLSCDGWVSNLITPTCGVKQGDPLSPFVFNLVINELLKRLPAEIGVEVGGGRISALAFADDLVFFASTPGGLQVALDTSFGFLKQCGLRVNATKSFTVSIRNVPHNKMTVVDSSITFKCLGAMLPALQRTSKWMYLGVPFTPEGRAYGQEVPNLKLALAKLTKAPLKPQQRLFALRTVLLPGFYHLLTLGSTTLSSLKKMDALVRREVRAWLSLPHDTVNAYFHANAKDGGLSIPSLRWRMPLRRFFRLRDLIEHIGQSKLLTREIDAALLRLKDRQREVLDSSAKLEARWAELLHASVDGGALKDSRKHPQQHQWVTDGSRFLSGKDFVNCIKLRINAMPTRSRTSRGRACDRSCRGGCNATETLNHVLQQCHRTHKSRVDRHNAIVSYVARSLSKAYTNVLTEPHFRTPEGLRKPDLVAYKDGKGIVLDAQVVSEHADLRTAHRNKIDYYSPLSNLIKERYRLNDVSFGSITLTSRGVWSGPSAQDLIDRKILNKSELKILSTRALVGAIAAFWKFNRTTTTKGPHVPH

SEQ ID NO: 32879 - protein, 955 aa, Ancistrocerus nigricornis
MHKDLYDRRVALSIVNRKAPWSEEELSLLARQEATLTLSGEKFLNQALHRSFPLRTIEAIKGQRKRPSYKEKVLSALALLKPSPTPSNAVPEMVCEVGALGRAIAAEISSLAPLDGNDYDVAHLSAISTNLLTWSHAEILRELECYLLKVLPPQPPRVQGERTSHDHLAKSLTKRRARRIEYAKVQRHWKANRFDCIRAVLKRKTSSRTPKQDVMVPFWRTVLTDGSDSTPGSTKPPEVFSDLWGPIKAAEIKACFPGLSSAPGPDGLTPRQLQAIPLGVLLRVLNIIMFVGKLPSHLLESRTILIPKKEEACEPGDFRPITISSVLTRTFHKILAKRLMSKIEIDKRQKAFMPVDGCSQNVFMLDLILRTRRQEFKSLYMASVDIAKAFDSVSHNTIYDTLRTVGLPDAMIEYIRDLYSRSTTRLSCDGWVSNLITPTCGVKQGDPLSPFVFNLVINELLKRLPAEIGVEVGGGRISALAFADDLVFFASTPGGLQVALDTSFGFLKQCGLRVNATKSFTVSIRNVPHNKMTVVDSSITFKCLGAMLPALQRTSKWMYLGVPFTPEGRAYGQEVPNLKLALAKLTKAPLKPQQRLFALRTVLLPGFYHLLTLGSTTLSSLKKMDALVRREVRAWLSLPHDTVNAYFHANAKDGGLSIPSLRWRMPLRRFFRLRDLIEHIGQSKLLTREIDAALLRLKDRQREVLDSSAKLEARWAELLHASVDGGALKDSRKHPQQHQWVTDGSRFLSGKDFVNCIKLRINAMPTRSRTSRGRACDRSCRGGCNATETLNHVLQQCHRTHKSRVDRHNAIVSYVARSLSKAYTNVLTEPHFRTPEGLRKPDLVAYKDGKGIVLDAQVVSEHADLRTAHRNKIDYYSPLSNLIKERYRLNDVSFGSITLTSRGVWSGPSAQDLIDRKILNKSELKILSTRALVGAIAAFWKFNRTTTTKGPHVPH

SEQ ID NO: 32880 - protein, 946 aa, Conopomorpha cramerella
MPDSQRSQCPYCPGSSRSFIAPHGLNVHIGRVHKHLSSQVSTAAADTGVPVTDSSRTTARLANIPSLKESVRVLKHIPKGARGALAAGKLAQIIDRCVRNNGTEDWYELLTFAFLALRVPDGGDCRSLTSKVKENIGFLSENTRASVFHSSRRGGLGSLGPLIEHKVHDGDVSGAVRLLLSDCTVAPDNDVTVCELRRKHPSPSRPLVFPPEPDRSYATLSVSIDDVADTIGSFNSGSAAGLDGLRPEHLKELTSRSAGDNGPRLLGSISALCNFLLSGQLNLEVCPYLYGASLCALLKKDGGIRPIAVGCVIRRLVSKLGCRAVKREMADYLQPHQLGFGTPLGCEAAIHAVRGFVMDAANSDKVVVKLDIQNAFNSIERDIILKEVRDKIPSLYPYLNQCYAHPSRLFFRSAPFMSQVGVQQGDPLGPLVFSLAIQRVIREFKSPLNLWYLDDGTVGGPPDVVAEDLKLLTSRFAELGLEINRTKCELFPLSTKADYTCCVSALPGLKVLDRSTFTLLGAPIFPESVPPLLEGKIQQLQRAKERLKGISAHVALTLFRSCLSIPKLTYALRTSPVWRFPLEVSRLDAVLKCMAEDILNVALDDQQWCQAALPIRHGGLGIRRVHDVCLSAFLASSHGAAGLVTQILNVNGDGFVVPFADEALLGWKAQCPGQEIPNNPAVQREWDNVAAKCTREGLLRISTGVDMARLRSVAESESGAWLHALPSPHFGTLLDNDSLRIAVALRLGCKVCEKHRCICGMEADDLGHHGLSCTRCVGRYPRHHALNDIVRRALVSAGVPCILEPPGLSRTDGKRPDGLTLVPWQRGRSMVWDVTCVSTFAGSHLQSTSRHAGAAAETAARAKHSKYDVLKVSYLFIPVAVEVTGVLGDEARRLFRELGRRFAEYGLDNRAGFFLLQSFSIAIQRGNAASIMGTFGSDVDRGGVLG

SEQ ID NO: 32881 - protein, 945 aa, Conopomorpha cramerella
MPDSQRSQCPYCPGSSRSFIAPHGLNVHIGRVHKHLSSQVSTAAADTGVPVTDSSRTTARLANIPSLKESVRVLKHIPKGARPLAAGKLAQIIDRCVRNNGTEDWYELLTFAFLALRVPDGGDCRSLTSKVKENIGFLSENTRASVFHSSRRGGLGSLGPLIEHKVHDGDLSGAVRLLLSDCTVAPDNDVTVCELRRKHPSPSRPLVFPPEPDRSYATLSVSIDDVADTIGSFNSGSAAGLDGLRPEHLKELTSRSAGDNGPRLLGSISALCNFLLSGQLNLEVCPYLYGASLCALLKKDGGIRPIAVGCVIRRLVSKLGCRAVKREMADYLQPHQLGFGTPLGCEAAIHAVRGFVMDAANSDKVVVKLDIQNAFNSIERDIILKEVRDKIPSLYPYLNQCYAHPSRLFFRSAPFMSQVGVQQGDPLGPLVFSLAIQRVIREFKSPLNLWYLDDGTVGGPPDVVAEDLKLLTSRFAELGLEINRTKCELFPLSTKADYTCCVSALPGLKVLDRSTFTLLGAPIFPESVPPLLEGKIQQLQRAKERLKGISAHVALTLFRSCLSIPKLTYALRTSPVWRFPLEVSRLDAVLKCMAEDILNVALDDQQWCQAALPIRHGGLGIRRVHDVCLSAFLASSHGAAGLVTQILNVNGDGFVVPFADEALLGWKAQCPGQEIPNNPAVQREWDNVAAKCTREGLLRISTGVDMARLRSVAESESGAWLHALPSPHFGTLLDNDSLRIAVALRLGCKVCEKHRCICGMEADDLGHHGLSCTRCVGRYPRHHALNDIVRRALVSAGVPCILEPPGLSRTDGKRPDGLTLVPWQRGRSMVWDVTCVSTFAGSHLQSTSRHAGAAAETAARAKHSKYDVLKVSYLFIPVAVEVTGVLGDEARRLFRELGRRFAEYGLDNRAGFFLLQRFSIAIQRGNAASIMGTFGSDVDRGGVLG

SEQ ID NO: 32882 - protein, 1100 aa, Limonius californicus
MPTLPPQQDECLCACGKVFANPTSLKQHQRRYCRGAAHQNLDEHHCAICQRVFNSFPGLRQHQRHAHPVEYNAEMEEEAGRSKVRAWGRLETLEMAKEEARFEGLHINQHLANLLERTVDSIKYKRRTGDYKQLLDQVKSDIEEAASIHSSADEGDLTSPSNTRPPLRTSPRYYANYEYTPPRTRSQSNRAPTSPQPSTSNLPPPSPSPPSTPSHNSSPVFSLSPSPPPIISDPILVFLRELAASPDLEPPDAALLNLFFEDDISSIPFENWCNTFILNLLPRGNTHSTSRDRHANIPNERAKGYGGGAARAYAFKKAQLLFKNNRRQLAANIFDEVQELSSDKTPPLEICENTYRGIFGADDIHDDEVLNERVANDVVVYDAVTALDLQLAISGTKSESAGPDGFKISQIRRIPINKLLILFNGMLYFSYIPPIFKECRTILIPKGGDPSDIGNWRPITVSSIFLRLINKILGKRLATLPIHHGQRGFVRMDGCLANLLTLQYAIKHHRKFAKPLNILSLDLRKAFDTVSRSSIVRALHRFNVHGKIIQFINSGYTDCFTTVSCLGQKTNKIQITRGVKQGDPLSPVLFNIVIDELICELQDSGGGIQILPDSRLAVMAFADDLALFAGSVREAQRLLRISNKFFERRGLQLNPSKCTALSMGVVPAKKKLFICSTARFYVHGTPFRQITVSDLFKYLGLNYGYLGAGRPHVPTIINQLHRLERAPLKPSQKFNLLKFYLWPRLFSMLQSPNIFSKDLKNLDKILRSSTRKILHLPKTVPNAFIHTDLKGGGLGLMCLTDHVPLVLQSRFQRLRMSADTILASIMDSDWGKTLLTRLQKGLRREVTGGMSKGQLKERWRGALETSTAGNGLLQGCTTAVSSAWVDRPPSFWKGGDYVKAVQLRSNTLPTLGAPHLRLRCRAGCQRIESLSHVLQGCPVTHWPRINRHNYAVTTVKSIAERDGWNADLEPYIRGTDGLGRKPDLVLVKGDEAIVSDIAIHWEGPRSLDVGFNNKILYYSQPSFLTPLRAKYPNCSTFHILPLVVGARGIWCFRNEKLCGKIGASEGDRRKIIHGVISGSIKTHGWFSKATWRGNDGVAQR

SEQ ID NO: 32883 - protein, 1190 aa, Bradysia coprophila
MESDSGGADSLPNMMPKEIFRIESTDLRKKSKTNSQHFEVIENEGNGNCLFESIFQFMKGKNKIFKSIPKTINALRLEIVNHIISPSSNCFQSNWDRFKNTLIFNNHKQIPSLLNLNDSRYSDGKGKIDYFEYMSESEPGNYGTFTELTAASEMLGFIGFVVRITDDDQFNCFDFGLSNNPELNNNKPIMFLSFTGPPDNGHFRLLKPTSRKSFIIESGIYYQMASDESNVTSISNVPKISNVEDTASTESRHTCQLCPKELQKSFATKKGLRIHSAAKHPGVPLNDVKSSEDRNEATDHLKYIGSYKRKIRLLHRIPKGARILAASKLTSIPNACISNNDDSAWENLLLYSYKALHAPEKSKTNSLVSSVKSNISNFILPNVKSSKSNKKNTKTSEEKLIERVEAKVADFDIRGAVRLLTSNESLAISDTNTLQELKKKHPSPSRSLELPEEPTEKMEFYIVNEKHVKKAINSFKHGSASGFDGLSPQFIKDIISHSAGDAGVQALSAITRLCNFILSGKINKDICKYVFGAALCALQKKCGGIRPIAVGNYFRRLVSKLACAKIRNEIGEYFRPHQVGFATKLGCEAAIHATRSTVIASKNTTKVLLKIDFRNAFNSVERDVMLSEIKQHAPKMFPYLWQCYSTPSYLFYGENMILSEVGAQQGDPAGPLAFSLAIQPIVNSLTSDLNLWYLDDGTLCDFPEKVLADFKNLIEQSKRIGLEVNPNKCELYFCNGQRDENLISEFEKLAPNIQVTNSVNLNLLGSPILEDGFDHFSSEAFARLSALFDRLPKLNAHVGYVILKKCFGIPKLTYLLRTNPVWKHGSFTSRVDEAMKNSLETILNIQINEEQWKQASLPIKLGGLGIRKSEDLALPSFLSSSYGSKNLVSQIMNNSSGEFLIHHFEDAVTEWNKLNPNQIPKVPDFQRNWDSINLKRIIKSMNFNSPQEKARFLASQTVESGHWLNAIPSANVGTFLNNNQLRIGMALRIGSDICRPHTCNCGENVKSDGRHGLNCVNSKGRFSRHSKMNDTTARVLRLIEVPAKLEPTGLYRDDGKRPDGMSLIPWTKGQCVVWDATCVNTFADSYIKRTSVKAGSAADSAVTKKHNLYKQIKSQNYKFVALAVETMGSWSNEAKEFFYSVGKRLEKVTGDPRSIQFLYQRISLAIQQNNAACVMGTIPDTVQMDEIFYL

SEQ ID NO: 32884 - protein, 1097 aa, Tenebrio molitor
MVAATGLTQHQIRYRREKPVYKLYLEKARKELAREIGQKNPPSQVTRDGAIRTASSKTPCRENSAATKPKTVLPLVKSIAEDLTKAEGSGARPRPNTRPGKPQSVQKPESVRAAKNVSEPSNTEVPPPPRQTRKRLEVEASRCPRGTGAGSPSGNDRNNAEQSPNVSRRIPRSTNQRNKNTARATTTTRQRLSQSLQQSEQAESHGSEAIELESEAISLHLKQCLVSLPKEETALVALVRAALNEPQERLIELVDDWLVATMQGQPRNKRHQRKNRRCDADSKIPSEGRDAVVKTAHHYGQVKTGSSLRAARFKRAQDLYCKNRSGLAEAILEGRPLDSNKALDVPRQKDVEDLYGGILESPSPADDSPFSPKPGNQGNVLQPITQNDVRAAKINWRQSAQGPDKISVGCVKLVSEEKLSILYNVLLLRNVQPTSWTRTNTTLIPKGGDLKNAENWRPITIGSAVQRLFHRILVKRLKAHVDLSTHQRGFVNIDGTLGNSLILDQYILDRTIKGKAYQVVSLDIRKAFDTVSHHSISRSMRRFRVHKILRQYIMSTFTSTTTIKVGEGQTRPLKILRGVRQGDPLSPLLFNMVMDELLESLNSNFSGGSLPNGAKCAAMAFADDIIMLSDHEVEVPLMLRTVEEFLRERGMSVNPAKCRTLVTGVVAGRTVPRTKRSTYKINNSPIPVVTIADTFKYLGHGFGYSGVGKPSLRNLTVWLENLGRAPLKPDQKLTMVKTYVIPRLLYGFQNPKVTTKALREADRLIRKFIKTSLHLNVHTPDASIHASIRDGGLGVLELRAAIPRIFLSRLVKLTEHTNDQVICTLLQSTYSVKLMGRLSKMAGEIHDSAAWRARLKSGPLTKGLEQATEDPASRAWILEKPRGWSGKDFVHAVQLRTANLPTKAIPSTPKDQRRCRGGCGVDESISHVLQTCPITHWERIRRHNEIVGKIARHCKIRGWKVEDEPHVRHRTGELFKPDLAVHQPGNLLVIADVQISWDCTELGVSYERKRRKYDTPHFREAATNRWPGKSIAFAPVIVGARGIWPRINNERSDVLQIPASVRRSCVNTTLKWGSTIHRAFSKAVWMNTCGALASRTN

SEQ ID NO: 32885 - protein, 1131 aa, Dermatophagoides pteronyssinus
MDDNNQNQNYTPNHDSNNDTNQANMVSGEDDRSVEVSQPATNHVNDAIFQTIVELANQQNESNEWIFLVISKIYQKYKRMPNGWWRKVTNTVNNRFNTEINIIQVKNIWKKESRKRQNNEIHRNFDTLDSSENENIPAKIFNKKLFSLIKQELIKNCDIYCKNREPKIRTKKVAKSSINKEIIYYLNIIIRSSDLKMKYIPTGSLSEISNMLYACQITYENTVQQRKNQNVNNPKCFRLNEKIKKWQDDLNILNNYDQSQRPSREIIRICKRYHIHSKDNVEVTNLKVRLNDQITIKQTEIKRYKSRTEFNKQNHQFEFNRKQFYRSLESNVKNTISENIDLDSTKKYWEEIWCGHDSTTGNYENLINTIQPINLQIDTSNEKIANIVKNNIRFLSNWKAPGKDFIYNFWIKKLTSLHNVLINAICEAIKNPNENIDESLYEGITYLIPKKEISSEPKDLRPITCLSNIYKLTSKTFTTLFNEICEINDIISSNQMGTRNRCQGAKEQSLINKTIYTSHHNLSTCWIDVTKAFDSIDHKYLMKCIEKLELPDFMASFIKRMLEMQQVSLRCLNNDIGTVKIGNGIMQGDSLSPKLFVFALEPLSRLLNNTFEKVPCDEDSLLERNHLCFIDDIKLIAFDTNTLESMCELTNQSLLTMGLKINQDKSNTNVTSDRVVGGFLNETNTYKYLGIVENSESQIVEQNKFILKDKIKKRIEELCQTRLNGVNMFRAINEYAISSINYYVGVVDFSPEEFKDIDKEIRQILNKYKIIWKSANNDRLYLKRNELGRGLINVEEHAELMMFKLLNHLESRPETRVVVENERTNIAPLGYIREYIQAKYKFNDLNFDFKDIQMEQYMMRLEKIKEKKLHGILFSDDDHHIDIRQSSIWLSHGNISAREEGALCALQDRNLFYDQRRCETCNKVKKTVDHIATHCGKYVKFEYTSRHDRVLKCCHLHIMKKFGFTKNNKIGLHKTEKSMCNKDGSIIIKSDTPIYTHNQTITENKPDIYVQDNNNRNIDIIEIGITNKNIISTTEITKHHKYDLLANSLKVMYPTFTTSNIPVVLSWDGLVTKYNNKYMQMLGINKKIMAFIQYSSLKSTFEIVCKDRGVRGTLWDVDEGLPGLEEEPGEY

SEQ ID NO: 32886 - protein, 1473 aa, Dolomedes plantarius
MSGFPLRPALSLPSLAPGSRLTENGTYSRIKFLPPCQLPTSQPLQPLPPLSMPSFVDGEFRVPAPPERVVSPAPTVQESSTSGSTPKTYASAVARSPQPHIPVQTPPVAARTRHAIAKNKNCAPVMPRPTKASALREACAKPRSEVNEKNMRKSPTNTGRVVSPVPGTSSGNNGEGSMACATSSCVVPSSSTACGNSASNVGTSTSTSTPREAVECNSRPPSCVNVDTPTISRSEEELTENIGEGRGPVVVSPESSPGLSIALSDDSQSSLREDFIVVENRRRKKPPRSSVNNAANRPSTSAVTPVSNGQNQRMQSNRNNPSPVIPVISPSSSESDVEGEFPGVTCRRGTTLHFVLPIRSALRCTEDGCGSSFVGKNWGTEKGSLKRHLEQIHGLPKCRDVRWCFFCERQVPQKVSRHSCLSGVDFFDPSLEEHRYKCRRCDFTCPSVSGIRNHFRTHRASEIAARNQAMRDSQAVTSRAGSRITNNRTSAPPNAPQGGSTGSPPRSSGIVNSQFLPNLSESSAEEEVPEVEDQAPGVDFVEAERDTEPDPDDPSPSVAFTDRFRGMLNDNDLEWNSFEEALGLYIAFARTFVKIPEGRSAGGGQRQENVSDPRYIQKLYKRNRRRAVRLITGCESQRCAVPAEEIAQHFCPERPPAPSRELFSNRTRAPNPVEMHQFTPEEVWAKLRSAENSAPGPDRLTYNHWRSVDPEARTLAVIFNICLRMKRIPEAWRESVTILIPKTENPESPGDWRPIALGNTIIKTFTGCLGKRLVGWMEEHEILSRAQKGFLPHDGAFENNFVLQSKFQSARAGRRELCLMSLDVSNAFGSVPHEAIFYALEESGAGGVFTDLVKQLYHETTTCFLTGDNQSEPYAINSGVRQGCPLSGLLFNLAIDPVLREVEALSTDINILAFADDLLVFGNTPAELQAAVNKVANVTELIGLRLNPGKCASLHLRGNPVGCQPTTFNIKGEPVKCLEDGDSTKFLGKPIGFCLVPDPNCVSQLAEPAEKILNSFLAPWQRLDALKSFFYPSIHYAQRTKQFKKTDWSGLDKRLKPLIKKTLNLPKNACTGYMYGNAKRGLFGIPEAAEDSDIAVIDGAFKLLSSKDERVADMAWVELTELVGVRMQGDPRAGDLSYYMSGHDYRSTSNPNTRIWTQARAASARLGVRWHLHDDRSLSLSIGQTVVNNRRKVFSSLRTYFRDAKADELAALPHQGKAFELFSKSRASTHFHRAGEYTRFADWRFIHQARLGLVPLNAYKSSASGPVDTRCRRCNYPDETLPHVVNHCRGKLPLITKRHNEIVNRLKRAAAGRWDVTWENQYVAGTTLKPDLVLTKGSDAIVLDVTVPFENGPDAFNAARRQKIEKYSPLIEPLKARYKTLRVEAVVVGALGSWDRENDKVVARLCSRKYAAKMRKFIVSDTIRATRHIYMEHLTGHRQVPMSRQRAYEQRVNNAVTAARNNVGNADASGGSN

SEQ ID NO: 32887 - protein, 1039 aa, unidentified
MALQGGIIRDFSDCAIKSVSPPNRVLALCLLLTERREERTPAQPGPWGCQPPGFVLVGPKTQNQASDEHGGPAGPSAPANPPNQEDDANYVCGFPGCNRRFPTNRGRGVHQQRTHKDWYDAQLQVGGDKARWSAEESMMLARREAELIIESNPRFINQELLRLFPRRTLEAIKGKRKKQAHKDMVKTFLDEIRNPPAAMPEMIEEDPDNEFLDYLESLPQVRSQEYHTEDLQLIISEARTRGKEATFQRTTLYLREIFPVPPPRTVRQRRTTQPPKTKRDARRKEYGSTQNLWSRNRRQCITKILEGLDNVVQPSRNIMEPYWTTIMTAEADTAPQTERAPIIEGLWTPITEADLRWSRIDRSSAAGPDGVSARLFRAIPAHILLRVYNVLMWCRKLPEDLLRSRTVFLPKKQDASEPGDFRPITIPPVLVRGLHKILAKRMEVLLDIDPRQRAFRSMDGCADNIFLLDTLLRMHRKEFRPLYLASLDVGKAFDSITHATIEATLTSLGVPASMVEYLKNVYAGSSTRLEGDGWTSPYIHPARGVRQGDPLSPVIFNAVTHRMLRRLPNEIGAQLGDTPINAAAFADDLLLFATTPGGLQTLIDIVTGYLAECGMVINSAKSMTVAIKAAPHIKKTAVDGNAIFSSDGRPLPGLTRSEGWRYLGVGFTPEGRSQCRPAQILEPMLEKLTKAPLKPQQRVFALRTMIVPKLYHQLALGAVTIGALNKTDRLLRNALRRWLALPHDTPNAYFHASVKEGGIGVPSMRWTAPVQRRGRLLAARESLGHQGLNKFADEELEKCRKRLTDHGVFYRNPDMIARRWSARLYESIDGSALKDSAKTPHQHQWIADGSKMLSGRDYISCQRTRIGALPTKSRTTRGRPQERRCRAGCQAQETLNHVLQHCHRTHGARIKRHNAVVSHIARNIPRGGYQVFHEPHYKTSIGLRKPDIVAVLGRTAVVVDAQVVSEQTDLADAHKRKAQYYSDPAVVEAIKREHGVQEVVTTSATLSWRGIWSENSARELRSLGFIRNQDLKIVPTRVL

SEQ ID NO: 32888 - protein, 1054 aa, Lasius niger
MPSSRFLPLMGGSPPASFRRRPGKEGIPAPPGPWGCQPLGLVLVGPKNRNQASDNSGGPSGPSAPANPPSQVDDADFRCEFPGCNRTFPTNRGRGVHHQRAHKDWFDARLQPAVDKVRWTAEETAMLARKEAELTVESNPRFINQELLQYFPQRTLEAIKGKRRNQEYRELVEEFVEEFRNPDVITIEDDEEDEEDQRDIFLDYLESLTRPQGREFQATRLHNIAMEARTSGKDATLQKIALYLREVFPAPPPRRERRRKKTPNPAPMRKREARRCEYGAAQSLWKRDRRHCITNILNEMGPVNQPPRETMEPYWTRMMTTDGRTSPPSDKVPIKEDIWTPITGNDIKRSRIPRASAPGPDGISARLYRSIPTTVIIRLFNLLLWCERLPEDLLLSRTIFLPKKTNASEPGDFRPITIPPVLVRGLHKILAKRLETALDIDPRQRAFRSMDGCADNTLLLDTLLRYHRKQYKSLYMASIDVSKAFDAVTHPTIESTLISLGVPPPMIRYLGQVYANSRTRIEGDGWTSKPVHPKRGVRQGDPLSPILFNAVTHRLLQRLPREVGARLGNIPINAAAYADDLLLFASTSMGLQQMIDTMTDYLAECGMTINVEKSMTVAIRAAPHLKKTAVDASLSFSCGGRQLPSLKRTNKWRYLGVVFTPEGRAQCRPAEVVAPLLGALTKAPLKPQQRLYALRTVVIPKLYHQLALGAVTIGTLNKTDRLVRGALRKWLALPHDTPNAYFHTSVRDGGLGIPAIRWTAPVQRRGRLLGVMKALGQQGLDRFIQDELNTCKKRLTDHGVLLGTPEMVAKRWAQQLYGSIDGAGLKDSAKTPHQHQWIADGSKFLTGKDFINCNRARIGALPTRSRTTRGRPQDRRCRGGCLAQETLNHVLQHCHRTHGQRIKRHDAVVKYIARNMPRSGYEVHQEPHYKTELGLRKPDLVAVLGQTAIIIDAQVVSEQTNLDDAHTRKVAYYNEPATIRAIKAEHGVRTVKVTSATLSWKGVWSPRSAEELRKLGFIRAGDAKVVATRVLIGNIAAFRTFNATTSVEHRAGIG

SEQ ID NO: 32889 - protein, 655 aa, Idaea aversata
MCALRKKDGGLRPIAVGNTFRRLVAKVACKSVKERMADYLHPHQLGFGTRLGCEAAIHATRAFVADQANSGNVLIKLDLQNAFNTLERDVLLKEVKENTPSLYPFLFQVYRSPSNLFYDGDILLSQVGAQQGDPLGPLTFSLGIQKIVAGLRSPLNVWYLDDGVLGGLPEHVGEDLQNLIARFEEIGLRVNAAKCEFFPCDSEASLSFSMFNTILPGLKELTPLTLNLLGSPIFPEAVPEAIEQKKNLLGVAHSRVVNLSGHTGLILLRMCFAVPKVTYLLRTAPTWLFAQQVADFDEVLKGTVETVLNVHLTEAQWSQASLPVRHGGLGIRRMCDVGLPAFLASAYGVVDLVTNILALDGDRVTIPFAADACEEWKALNPSVDLPGVLHSQRLWDDVGAKRTYDELMSAASVVDVARLRAVARPESGAWLHALPSPHLGTLLDNDSLRVAVALRLGCDICEPHVCICGSTVGADGHHALACCRCSGRFPRHHALNDILRRALISANIPCVLEPPGLSRTDGKRPDGLTLVPWEKGRCLLWDATCVSTFAVSHLGRTFREAAAAAETAARRKRDKYAPLLPNYLFVPFAVETAGSWASEAVTFVREIGRRLRDRGFDYRSGSFLVQRLAVAIQRGNAASILGSFAPGAVRGGLFE

SEQ ID NO: 32890 - protein, 948 aa, Idaea aversata
MSSDRTVCPHCPGSTRLFSQHGLKIHISRMHKVSPSQNDSQLAVSSDIPLGQRPPPESSSLNDLGFLKKSVPVLRHIPKGARCAAAGQLDILIKKCLSSNSIEDWGLLLTFAYRALKVPSRSGNSNLTQKVKENIFNCANTTFSEDPGIIGSVPRVSSLYKTIESKVHDGDLKGAVRLLMSDNTIAKPGPETLDSLRSKHPSPSRTLSFPGDPDDSFSHLEVRSEDVALALASFNTGSAAGLDGLRPGHLKELLSASAGDGGPCLLQSLTDLTNFLLSGRLNPEVCPFLYGASMCALRKKDGGLRPIAVGNTFRRLVAKVACKSVKETMADYLHPHQLGFGTRLGCEAAIHATRAFVADQANSGNVLIKLDLQNAFNTLERDVLLKEVKENTPSLYPFLFQVYRCPSNLFYDGDILLSQVGAQQGDPLGPLTFSLGIQKIVAGLRSPLNVWYLDDGVLGGLPEHVGEDLQNLIARFEEIGLRVNAAKCEFFPCDSEASLSFSMFNTVLPGLKELTPLTLNLLGSPIFPEAVPEAIEQKKNLLGVAHSRVVNLSGHTGLILLRMCFAVPKVTYLLRTAPTWLFAQRVADFDEVLKGTVETVLNVHLTEAQWSQASLPVRHGGLGIRRMCDVGLPAFLASAYGVVDLVTNILALDGDRVTIPFAADACEEWKDLNPSVDLPGVLHSQRLWDDVGAKRTYDELMSAASVVDVARLRAVARPESGAWLHALPSPHLGTLLDNDSLRVAVALRLGCDICEPHVCICGSTVGADGNHALACCRCSGRFPRHHALNDILRRALISANIPCVLEPPGLSRTDGKRPDGLTLVPWEKGRCLLWDATCVSTFAVSHLGRTFREAAAAAETAARRKRDKYAPLLPNYLFVPFAVETAGSWASEAVTFVREIGRRLRDRGFDYRSGSFLVQRLAVAIQRGNAASILGSFAPGAVRGGLFE

SEQ ID NO: 32891 - protein, 1091 aa, Coccinella septempunctata
MRAHYIAQYLAAQSDRTYRQLLLETWRDMYPTRPANVQLLSNRVRWILANQKLSQAELDRIENTCFPTIQLTVEQPVEARRSSVRVRRSGLFENRGQNDEVERAFLRNLMSYSGMTPECRPRIPKLDYSKAVLESLQSLNTTLPKHLNNVKTLEQVVSVVYAGAATICEMNGQKLQQRNAHHHTMESSIPPWKARLQGEITRLRKKIGIIHTYLSNPAPSTRVVKAVRKVASEFRIKRRDPMFGEKISLRCDTMKQKIKVLGLRIRRYNEKVKRHNNNRLFFKNQKQFFRNLEQEKEHVEGHLDSKTAHQYWSKIWSENVTYDDQAYWIEEAQETIPRAQMQDLRIEAADITEALKGLNNWAAPGADGLHNYWWKHLSSVHGPLAEIFQAALSDPSGVPDFFTKGITHLIKKKGDSSNPENYRPITCLPSVYKIFTSILAKYIGDHLRQNNLMAEEQSGCRMKTKGSKELLVVDYILTKQARKKLRNISVAWVDYRKAFDSISHSWLLRVLRMHGIADNIITALESLMKTWRTSLQIRAGDLLGTSDEIRIQRGIFQGDSLSPVWFCLALNPLSMLLNNTKYGYIIDKQQNIKTNHNLYMDDLKIYAASMEQLRRLLEIVAAFSESINMQLGIEKCAVLEVKRGKIQETQHQTLMNNVTIPALDDDGTYKYLGISQALEIRTSEMKKMFKDKLYARLRLLMKTGLNSKAFFTAINIWAIPSMMYSFGVLTWSRTELREMDRAVRATLTRYGVHHPHSSNIRLYLKRQQGGRGLLNLEAAHDKHIDSLRGYFHESDSPLLQAICRADENYSALGLSNRADRVSGRSSDELIEEWKSKALHGRYASLLESGHVNKVESLSYLRAGYLLPETEGRLIAIQDQVMPTRMYLKHIAKQDIPSDRCRRCFQAPESIQHLTSSCSVMAPRDYLDRHNAMAKIYHQHLALKLGLLCSEEEHYRYQPKTLLESSRYKLYWDATLITDGGVAHNRPDIALFDLEQKTCVLLDVTIPADDNIPRAYSEKISKYNDLAFQLRALHNLKGISILPLIISTNGLVEKHLIENTRKLGLDQTIISRAQKQVLLNTVRIVRKCLQGQ

SEQ ID NO: 32892 - protein, 1256 aa, Coccinella septempunctata
MMMNPNTNIYIYIYIYIYIYIYIYIYIYIYIYIYIYIYIYIYIYRRVVARLSGSDVPANPSRHIPAKVGTLREDYVNSAPITRSRHQGGGESQADSLRNRQEDWPVGGVCGVSGAPLRDGTARPVPATHRRDSSTSLSEPPARSATEPQRDRRTRWTLFENYCLMRAHYIAQHLAAQSDRTYRQLLLETWGDIYPTRPAYAQLLSNRVRWILANQKLSQAELETIKSTCFPTVLSEVQPTIEQPGETRRSSVRVRRSGLFVNREQDNEIEKAFIRNLMSYSGMTPECRPRIPKLDYSKPALETLRSMNSALPKHLSDVKTLEQLVSVVYAGAVTVCEMNGQKINDHKQAMRSSIPPWKDRLQREITKIRKKIGIIHTYLNTPSPSTRVVRAARKVASEFHIRRRDPLFREKISLRCDTLKQRIKVLGLRIRRYNEKVKRHNNNRLFFKNQKQFFRNLEQEKEHMEGHLNPKTAHQYWSEIWSENVTYDDQAYWIDEAQKKIPQAQMQDLNIVVVDITEALRGLNNWAAPGVDGIHNYWWKHLTSVHGPLADIFQRALCDPSVTPDFFTKGVTHLIKKKGDCKNPENYRPITCLPSVYKIFTSILAKYIGNHLRENNMMAEEQNGCRMKTKGSKELLVVDYILTKQARKKLRNISVAWVDYRKAFDSIPHSWLLRVLRMHGIADNIITALECLMKTWRTSLLIRTGDLGEMSEEIRIRRGIFQGDSLSPIWFCLALNPLSKLLNNTNYGYVIDKQRNIRINHNLYMDDLKIHAASIEQLRRLLEIVAAFSDSIKMQLGIEKCAVLEVKRGKIQETQHQTLMNNITIPALDDDGTYKYLGINQALEIKTTEMKKIFKDKLYARLKLLMKTGLNSRALFTAINIWAIPSMVYSFGVLSWSRTELREIDRAIRTTLTRYGVHHPHSSIIRLYLGRQQGGRGLLNLEQVHDKHIESLRDYFHGSDSLLLQAMCRADENYSALGLSVRDGRVSGRSTEEWIEEWKSKALHGRYASLLEGGHVNKVESLSYLRAGYLFPETEGRLIAIQDQVVPTRMYLKHIAKQDVPSDRCRRCFQAPESIQHLTSSCSVMAPRDYLDRHNAMAKIYHQHLALKLGLLDSEEEHYRYQPKTLLQSIRYRLYWDATLITDGGVAHNRPDIALFDLEQKICFLLDVTIPADDNVLRAYSEKISKYNDLAFQLRDIHNLKGISILPLIISTNGLVEKHLIENTRKLGLDQAIISLAQKQVLLSTVRIVRKCLQDQ

SEQ ID NO: 32893 - protein, 1096 aa, Adalia bipunctata
MRAHYIALNLAEQSDKTYRQLLLEIWGDLYPTRPAYAQLLSNRVRWILNNQKLSRAELEIIRSTCFPTIFSGGQLAGERRSETRRSSVRVRRSGLFGGDGLVDGIERFFVCNLIKYSGIAPDSRPGIPKLNYSRTVLETMKSLNSALPKHLNNVKTMEELVDVVYAAAVTVCEASGRKILNRSDRQYMRSLPSIPPWKDRLQRKITQLRKKIGIIHTYLSTLEPSTKVIKAVRKVASEFQIKRRDPTFREKVLVRCDTLKQKIKVLGLRIRRYNERIKRHNNNKLFYQNQKQFFRNLEQKEEHTEGRLDPKTAHQFWSSVWSENTTYDDHAYWIDEAQAKIRHVQMEDLRVQALDVADALKGLNNWAAPGIDGVHNYWWRHFTNAHQLLAELFQRALYDPSIVPTFFTRGITYLIKKKGDSGNPENYRPITCLPSVYKIFTTILAKHINTHLRRNNLMAEEQNGCRMRTKGSKELLVVDYILTKQARKKLRNISVAWVDYRKAFDSVPHSWLLRVLRMHGIAENIINTLEYVMKTWRTSLRVSTGERVEMSEEIRICRGIFQGDSLSPLWFCLALNPLSMLLKNTKYGYVMDRGREMRINHNLYMDDLKLYASSMDQLRRLLEIVASFSDSINMQFGVEKCAVLEVKRGKIQDTHHQTLMNNITISPLDDDGTYKYLGIEQALEIRTSDVKKTFKEKLYARLSLLLKSKLNSKALFTAINIWAIPSMLYSFGVLTWSKTELREMDRAVRTMLTKYGVHHPHSSTIRLYLKRQQGGRGLLNLEATHDRNIESLRTYFIRSDSPLLRAICRADEGFSALGLSVLDGRPLMRSDEEWIEEWKAKALHGRYASVLESEDINKIESLSYLRAGYLYPETEGRLMAIQDQVMPTRMYLKHIAKIDIPSDRCRRCFQAPESIQHLTSSCSVLAPRDYLDRHNAMANIYHQHLALKLGLLREEVEHYRYQPKTLLQSSRFKLYWDATLITDRGVAHNRPDIALFDLERKTCLLLDVTIPADDNVSRAYSEKICKYGDLAFQLREIHNLGAISILPLIISVNGLIEKHLTENTLKLGLDQSVVSLAQKQVILSTIRIVRKCLQGQ

SEQ ID NO: 32894 - protein, 1098 aa, Coccinella septempunctata
MRWTHVDNSTAIRAHFIAMRIAGGRGKTYMRTLNEIWNDMRPDRRTYAQHIANRVRWILDEEKLPRTELRTIERTCWPDRILREENTDISPVSDHREEQETAEDENVRGEDTDPQNQISVGFDRNLIKFSGMDPKSRQKIPRLKQNKKLMEDVRAVDKILSKLLRRDDTLIQVVDLVYAGAITVAELQGKTTSNNPERPSGDPPWKKRLERNINQHRSKLGIIQTYLSTQQPSRKVLRSMRVIARECKLRFTADDFRSKIKVTADNLKQKIKALGSRLRRYNERTKRYKNNRLYYANQKEFFRKLEGKMNTDGPPPTPEAVEGFWKGIWSEEVSHDGDADWLQEVVDQSRGEMMREIQIDVADIEWVLKSTNNWAAPGVDNIHNFWWKHFRSVHSSLARLFQKFLEKPELVPSFLTAGLTYMLPKGAESEDPKNYRPVTCLPTIYKLLTGVLTRHINNHVRSHNILATEQNGCKSKAMGAKELLITDVIITKHARKKLRNISVAWVDYKKAFDSVPHTWLLKVLSMYGVCGSVINLLKHLMSEWRTSLILRTGATIIKTADIAIRRGLFQGDTLSPLWFCLALNPLSMLINKQKYGYILDKNRKVKITHQLFIDDLNEEQLEKMLEIVATFSETIKMEMGLDKCARLTVKRGKIIENNSNILNPNAIQNLGRDETYKYLGIQQALEIKNAEMKEAFSKKLFYRVNQVLKSKLNSKCLFLALNTWALPIMTYTFGILTWSATELQALDTKIRTILTKYGVHHPHSSVARLYLQRHLGGRGMLNLETTHDKSVLKLREYFMKQNSPFVRTLRSVDVGCSPLRLSDSDFTQPIRTQQNLQEEWKAKVLHGRYPNNLENNNVNKKESLTYLKAGYLFPETEGRLLAIQDQVVPTRSYLKNIAGQQLTSDLCRKCKQGREHIQHVTSGCSILAPREYTDRHNQMAKVYHQAMALKLKLIKTKKKNHLYLPENVLENEEFKLYWDTTMVTDRPVANNRPDIVLLNKREKSCVIIDITVPSDDNISRAYTEKLTKYFDLSFELKEMYRLKKISIIPLVMSVNGLVEEHLVDNTKLLELDSYVVSSAQKEVILGTTRIVRRFLHSS

SEQ ID NO: 32895 - protein, 1105 aa, Coccinella septempunctata
MRWTHEDNSTAIRAHYIAMKLAGGRGINYMRTLNEIWNDMRPDRRTYAQHIANRVRWILNEEKIPRTELSMIENSCWPDIILGNESDETIVEIVPHENNELAPEDENIRGEGVGSQAHIFAALNRNLLKFRGMDPKIRPKIPRLRHCRKLKEDMSAVDKILSRIIDRDHSLLQIVDMVYAGAITVAELQGKTESPVEMRRPSGDPPWKTRLEKKIITYRSKLGSIHTYLSTQQPSRRVMKSMKIIAKQYKLRLGAGDFHNKIRLAADNLKQKIKALGARLRRYNDRTKRYRNNRLYYANQKEFFRNLEGGLKPDGPPPGCGSMEAFWSKIWSEEVSHDEGADWLKDVEDQSGKSIMSEVHIDVTDVQWVLKSANNWAAPGVDNIHNFWWKHFGSVHSSLARLFQKCLEKPELVPTYMTSGITYMLPKGSESENPANYRPVTCLPTIYKLLTGVLTRHINNYLRTNNILAKEQNGCKSKTMGAKELLISDLIITKHARKKLRNISVAWIDYRKAFDSVPHSWLLKVLSMYGICDSIINLLKHLMSGWHTSLVLRSEAGVLKTADIEIKRGLFQGDTLSPLWFCLALNPLSALINNQKYGYILDRIKKIKITHQLYIDDLKLYASNDEELAKQIQIVATFSEAIRMQMGLDKCARLTVKRGKISESDSSFLDQDAIQTLDKDETYKYLGIQQALEIKNAEMKEAFTKKLLWRVGQLLRSKLNSRSLFLALNTWAMPIMTYTFGVLTWSTTELQALDTKIRTILTKYGVHHPHSSVARLYLQRHLGGRGLVNLETAHNKTVIRLREYFMQQNSPYFRTLRAIDVGCSPLRLSDSGFAPPVRTQQSFREEWKAKALHGRYPNNLENNNVNKAESLTYMKAGYLFPETEGRLLAIQDQVVPTRSYLKNIAGQHLTTDLCRKCGQGREHIQHVTSGCSILAPREYTDRHNQMAKIYHQAIALKYNLLKVKKKNHLYLPEGVLENESYKLYWDTTIVTERPVANNRPDIVLFKKESKICYIIDITVPSDDNISRAYTEKISKYYDLSFNLKEMYQLKQVAVVPLVVSVNGLVEEHLSVNTMLLELDGYVISSAQKEVILGTTRIVRRFLHCS

SEQ ID NO: 32896 - protein, 1103 aa, Coccinella septempunctata
MRWTHVDNSTAIRAHFIAMRIAGGRGKTYMRTLNEIWNDMRPDRRTYAQHIANRVRWILDEEKLPRTELRTIERTCWPDRILREENTDISPVSDHREEQETAEDENVRGEDTDPQDQISVGFDRNLIKFSGMDPKSRQKIPRLKQNKKLMEDVRAVDKILSKLLRRDDTLIQVVDLVYAGAITVAELQGKTTSNNPERPSGDPPWKKRLERNINQHRSKLGIIQTYLSTQQPSRKVLRSMRVIARECKLRFTADDFRSKIKVTADNLKQKIKALGSRLRRYNERTKRYKNNRLYYANQKEFFRKLEGKMNTDGPPPTPEAVEGFWKGIWSEEVSHDGDADWLQEVVDQSRGEMMREIQIDVADIEWVLKSTNNWAAPGVDNIHNFWWKHFRSVHSSLARLFQKFLEKPELVPSFLTAGLTYMLPKGAESEDPKNYRPVTCLPTIYKLLTGVLTRHINNHVRSHNILATEQNGCKSKAMGAKELLITDVIITKHARKKLRNISVAWVDYKKAFDSVPHTWLLKVLSMYGVCGSVINLLKHLMSEWRTSLILRTGATIIKTADIAIRRGLFQGDTLSPLWFCLALNPLSMLINKQKYGYILDKNRKVKITHQLFIDDLKLYASNEEQLEKMLEIVATFSETIKMEMGLDKCARLTVKRGKIIENNSNILNPNAIQNLGRDETYKYLGIQQALEIKNAEMKEAFSKKLFYRVNQVLKSKLNSKSLFLALNTWALPIMTYTFGILTWSATELQALDTKIRTILTKYGVHHPHSSVARLYLQRHLGGRGMLNLETTHDKSVLKLREYFMKQNSPFVRTLRSVDVGCSPLRLSDSDFTQPIRTQQNLQEEWKAKVLHGRYPNNLENNNVNKKESLTYLKAGYLFPETEGRLLAIQDQVVPTRSYLKNIAGQQLTSDLCRKCKQGREHIQHVTSGCSILAPREYTDRHNQMAKVYHQAMALKLKLIKTKRKNHLYLPENVLENEEFKLYWDTTMVTDRPVANNRPDIVLLNKREKSCVIIDITVPSDDNISRAYTEKLTKYFDLSFELKEMYRLKKISIIPLVMSVNGLVEEHLVDNTKLLELDSYVVSSAQKEVILGTTRIVRRFLHSS

SEQ ID NO: 32897 - protein, 1103 aa, Coccinella septempunctata
MRWTHVDNSTAIRAHFIAMRIAGGRGKTYMRTLNEIWNDMRPDRRTYAQHIANRVRWILDEEKLPRTELRTIERTCWPDRILREENTDISPVSDHREEQETAEDENVRGEDTDPQDQISVGFDRNLIKFSGMDPKSRQKIPRLKQNKKLMEDVRAVDKILSKLLRRDDTLIQVVDLVYAGAITVAELQGKTTSNNPERPSDDPPWKKRLERNINQHRSKLGIIQTYLSTQQPSRKVLRSMRVIARECKLRFTADDFRSKIKVTADNLKQKIKALGSRLRRYNERTKRYKNNRLYYANQKEFFRKLEGKMNTDGPPPTPEAVEGFWKGIWSEEVSHDGDADWLQEVVDQSKGEMMREIQIDVADIEWVLKSTNNWAAPGVDNIHNFWWKHFRSVHSSLARLFQKFLEKPELVPSFLTAGLTYMLPKGAESEDPKNYRPVTCLPTIYKLLTGVLTQHINNHVRSHNILATEQNGCKSKAMGAKELLITDVIITKHARKKLRNISVAWVDYKKAFDSVPHTWLLKVLSVYGVCGSVINLLKHLMSEWRTSLILRTGATIIKTADIAIRRGLFQGDTLSPLWFCLALNPLSMLINEQKYGYILDKNRKVKITHQLFIDDLKLYASNEEQLEKMLEIVATFSETIKMEMGLNKCARLTVKRGKIIENNSNILNPNAIQNLGRDETYKYLGIQQALEIKNAEMKEAFSKKLFYRVNQVLKSKLNSKSLFLALNTWALPIMTYTFGILTWSATELQALDTKIRTILTKYGVHHPHSSVARLYLQRHLGGRGMLNLETTHDKSVLKLREYFMKQNSPFVRTLRSVDVGCSPLRLSDSDFTQPIRTQQNLQEEWKAKVLHGRYPNNLENNNVNKKESLTYLKAGYLFPETEGRLLAIQDQVVPTRSYLKNIAGQQLTSDLCRKCKQGREHIQHVTSGCSILAPREYTDRHNQMAKVYHQAMALKLKLIKTKRKNHLYLPENVLENEEFKLYWDTTMVTDRPVANNRPDIVLLNKREKSCVIIDITVPSDDNISRAYTEKLTKYFDLSFELKEMYRLKKISIIPLVMSVNGLVEEHLVDNTKLLELDSYVVSSAQKEVILGTTRIVRRFLHSS

SEQ ID NO: 32898 - protein, 1086 aa, Harmonia axyridis
MRIVGGRGKTYMRTLNEIWNNMRPDRRTYAQHIANRVRWILDEEKLPRTELRMIERTCWPDRILREDNTEIPPVCDHHEEQETTEDNENVLGEDTDPQDQIRTIFNRNLIKFSGMDPKSRQKIPRLKPNKKLIEDVRALDNILSKLLRRDDTLIEVVELVYAGAITVAELQGKTTSNNPERPSGDPPWKKRLERNINQHRSKLGIIQTYLSTQQPSRKVLRSVGVIARECKLRFTADDFRSKIKVTADNLKQKIKALGSRLRRYNERTKRYKNNRLYYANQKEFFRNLEGKVNTAGPPPTREAMEGFWKGIWSEEVNHDEGADWLREIEDQSRVEMMREIQIDVADVEWVLKSTNNWAAPGVDNIHNFWWKHFRSVHSSLARLFQQLLEKPELVPGFMTAGLTYMLTKGAESKDPKNYRPVTCLPTIYKLLTGVLTRHINNHVRSHNILATEQNGCKSKAMGAKELLITDVIITKHARKKLRNISVAWVDYKKAFDSVPHTWLLKVLSMYGVCGSVINLLKHLMGEWRTSLILKTGATIIKTADIAIRRGLFQGDSLSPLWFCLALNPLSTLINEQKYGYILDKNRKIKITHQLYIDDLKLYASNEEQLEKMLEIVATFSETIRMEMGLDKCARLKVKRGKISENDSNILNPNAIQNLGMDETYKYLGIQQALEIKNAEMKEAFSKKLFHRVNQVLKSKLNSKSLFLALNTWALPIMTYTFGVLTWSTTELQALDTKIRTILTKYGVHHPHSSVARLYLQRHLGGRGMLNLETSHNKSVIKLREYFMKQNLPFVRALRSLDVGCSPLRLSDSDFALPIRTQQNLQEEWKAKVLHGRYPNNLDNSNVKKKESLTYLKAGYLFPETEGRLLAIQDQVIPTRSYLKNIAGQQLTSDLCRKCKLGREHIQHVTSGCSILAPREYTDRHNQMAKVYHQAMALKLKLIKTKRKNHLYSPENVLENEEFKLYWDTTMVTDRPVANNRPDIVLLNKTEKSCEIIDITVPSDDNISRAYTEKITKYFDLSFELKEMYKLKKIFIIPLVMSVNGLVEEHLVDNTKMLELDIYVVSSAQKEVILGTTRIVRRFFHSS

SEQ ID NO: 32899 - protein, 1103 aa, Coccinella septempunctata
MRWTHVDNSTAIRAHFIAMRIAGGRGKTYMRTLNEIWNDMRPDRRTYAQHIANRVRWILDEEKLPRTELRTIERTCWPERILREENTDISPVSDHREEQETAEDENVRGEDTDPQDQISVGFDRNLIKFSGMDPKSRQKIPRLKQNKKLMEDVRAVDKILSKLLRRDDTLIQVVDLVYAGAITVAELQGKTTSNNPERPSGDPPWKKRLERNINQHRSKLGIIQTYLSTQQPSRKVLRSMRVIARECKLRFTADDFRSKIKVTADNLKQKIKALGSRLRRYNERTKRYKNNRLYYANQKEFFRKLEGKMNTDGPPPTPEAVEGFWKGIWSEEVSHDGDADWLQEVVDQSRGEMMREIQIDVADIEWVLKSTNNWAAPGVDNIHNFWWKHFRSVHSSLARLFQKFLEKPELVPSFLTAGLTYMLPKGAESEDPKNYRPVTCLPTIYKLLTGVLTRHINNHVRSHNILATEQNGCKSKAMGAKELLITDVIITKHARKKLRNISVAWVDYKKAFDSVPHTWLLKVLSMYGVCGSVINLLKHLMSEWRTSLILRTGATIIKTADIAIRRGLFQGDTLSPLWFCLALNPLSMLINKQKYGYILDKNRKVKITHQLFIDDLKLYASNEEQLEKMLEIVATFSETIKMEMGLDKCARLTVKRGKIIENNSNILNPNAIQNLGRDETYKYLGIQQALEIKNAEMKEAFSKKLFYRVNQVLKSKLNSKSLFLALNTWALPIMTYTFGILTWSATELQALDTKIRTILTKYGVHHPHSSVARLYLQRHLGGRGMLNLETTHDKSVLKLREYFMKQNSPFVRTLRSVDVGCSPLRLSDSDFTQPIRTQQNLQEEWKAKVLHGRYPNNLENNNVNKKESLTYLKAGYLFPETEGRLLAIQDQVVPTRSYLKNIAGQQLTSDLCRKCKQGREHIQHVTSGCSILAPREYTDRHNQMAKVYHQAMALKLKLIKTKRKNHLYLPENVLENEEFKLYWDTTMVTDRPVANNRPDIVLLNKREKSCVIIDITVPSDDNISRAYTEKLTKYFDLSFELKEMYRLKKISIIPLVMSVNGLVEEHLVDNTKLLELDSYVVSSAQKEVILGTTRIVRRFLHSS

SEQ ID NO: 32900 - protein, 1103 aa, Propylea japonica
MRWTHVDNSTAIRAHFIAMRIAGGRGKTYMRTLNEIWNDMRPDRRTYAQHIANRVRWILDEEKLPRTELRTIERTCWPDRILREENTDISPVSDHREEQETAEDENVRGEDTDPQDQIRTNFNRNLIKYIGMDPKSRQKIPRLKPNKKLMEDVRAVDKILSELLRRDDTLIQVVDLVYAGAITVAELQGKRTSNNPERPSGDPPWKKRLERNINQHRSKLGIIQTYLSTQQPSRKVLRSMRVIARECKLRFTADDFRSKIKVTADNLKQKIKALGSRLRRYNERTKRYKNNRLYYANQKEFFRKLEDKVNTDGPLPTPEAVEGFWKGIWSEEVSHDGDADWLQEVVDQSRGEMMRDIQVEVADIEWVLKSTNNWAAPGVDNIHNFWWKHFRSVHSSLARLFQRFLEKPELVPSFLTAGLTYMLPKGAESEDPKNYRPVTCLPTVYKLLTGVLTRHINNHVRSHNILATEQNGCKSKAMGAKELLITDVIITKHARKKLRNISVAWVDYKKAFDSVPHTWLLKVLSMYGVCGSVINLLKHLMSEWRTSLILRTGATIIKTADIAIRRGLFQGDTLSPLWFCLALNPLSMLINKQKYGYILDKNRKIKITHQLFIDDLKLYASNEEQLEKMLEIVATFSETIKMEMGLDKCARLTVKRGKIIENNSNILNPNAIQNLGRDETYKYLGIQQALEIKNAEMKEAFSKKLFYRVNQVLKSKLNSKSLFLALNTWALPIMTYTFGILTWSATELQALDTKIRTILTKYGVHHPHSSVARLYLQRHLGGRGMLNLETTHDKSVLKLREYFMKQNSPFVRTLRSVDVGCSPLRLSDSDFTQPIRTQQNLQEEWKAKVLHGRYPNNLENNNVNKKESLTYLKAGYLFPETEGRLLAIQDQVVPTRSYLKNIAGQQLTSDLCRKCKQGREHIQHVTSGCSILAPREYTDRHNQMAKVYHQAMALKLKLIKTKKKNHLYLPENVLENEEFKLYWDTTMVTDRPVANNRPDIVLLNKREKSCVIIDITVPSDDNISRAYSEKITKYFDLSFELKEMYKLKKISIIPLVMSVNGLVEEHLVDNTKLLELDSYVVSSAQKEVILGTTRIVRRFLHSS

SEQ ID NO: 32901 - protein, 1277 aa, Harmonia axyridis
MSYDQNGVVLCNYIYIYIYIYIYIYIYIYIYIYIYIYIIHIYIYIYIYIYIYIYIYIYIYILRRGSFGFRGVTTTRTLVDHRSRIATWIVCGIRNALASHSNTQGGGELRAGSLRNRPEDQLDGGSGGVSGAYLRSGTVRQRPAQTSEGKDGLAVSLDRPTTSQQQQTHQDRRMRWTHVDNSTAIRAHFIAMRIVGGRGKTYMRTLNEIWNNMRPDRRTYAQHIANRVRWILDEEKLPRTELRMIERTCWPDRILREDNTEIPPVCDHHEEQETTEDNENVRGEDTDPQDQIRTIFNRNLIKFSGMDPKSRQKIPRLKPNKKLIEDVRAVDNILSKLLRRDDTLIEVVELVYAGAITVAELQGKTTSNNPERPSGDPPWKKRLERNINQHRSKLGIIQTYLSTQQPSRRVLRSVGVIARECKLRFTADDFRSKTKVTADNLKQKIKALGSRLRRYNERTKRYKNNRLYYANQKEFFRNLEGKVNTAGPPPTREAMEGFWKGIWSEEVNHDEGADWLREIEDQSRVEMMREIQIDVADVEWVLKSTNNWAAPGVDNIHNFWWKHFRSVRSSLARLFQQLLEKPELVPGFMTAGLTYMLTKGAESKDPKNYRPVTCLPTIYKLLTGVLTRHINNHVRSHNILATEQNGCKSKAMGAKELLITDVIITKHARKKLRNISVAWVDYKKAFDSVPHTWLLKVLSMYGVCGSVINLLKHLMGEWRTSLILKTGATIIKTADIAIRRGLFQGDSLSPLWFCLALNPLSTLINEQKYGYILDKNRKIKITHQLYIDDLKLYASNEEQLEKMLEIVATFSETIRMEMGLDKCARLKVKRGKISENDSNIFNPNAIQNLGMDETYKYLGIQQALEIKNAEMKEAFSKKLFHRVNQVLKSKLNSKSLFLALNTWALPIMTYTFGVLTWSTTERQALDTKIRTILTKYGVHHPHSSVARLYLQRHLGGRGMLNLETSHNKSVIKLREYFMKQNLPFVRALRSLDVGCSPLRLSDSDFALPIRTQQNLQEEWKAKVLHGRYPNNLDNSNVKKKESLTYLKAGYLFPETEGRLLAIQDQVIPTRSYLKNIAGQQLTSDLCRKCKLGREHIQHVTSGCSILAPREYTDRHNQMAKVYHQAMALKLKLIKTKRKNHLYSPENVLENEEFKLYWDTTMVTDRPVANNRPDIVLLNKTEKSCEIIDITVPSDDNISRAYTEKITKYFDLSFELKEMYKLKKISIIPLVMSVNGLVEEHLVDNTKMLELDIYVVSSAQKEVILGTTRIVRRFFHSS

SEQ ID NO: 32902 - protein, 973 aa, Coccinella septempunctata
MDPKIRPKIPRLRHCRKLKEDMSAVDKILSRIIDRDHSLLQIVDMVYAGAITVAELQGKTESPVEMRRPSGDPPWKTRLEKKIITYRSKLGSIHTYLSTQQPSRRVMKSMKIIAKQYKLRLGAGDFHNKIRLAADNLKQKIKALGARLRRYNDRTKRYRNNRLYYANQKEFFRNLEGGLKPDGPPPGCGSMEAFWSKIWSEEVSHDEGADWLKDVEDQSGKSIMSEVHIDVTDVQWVLKSANNWAAPGVDNIHNFWWKHFGSVHSFLARLFQKCLEKPELVPTYMTSGITYMLPKGSESENPANYRPVTCLPTIYKLLTGVLTRHINNYLRTNNILAKEQNGCKSKTMGAKELLISDLIITKHARKKLRNISVAWIDYRKAFDSVPHSWLLKVLSMYGICDSIINLLKHLMSGWHTSLVLRSEAGVLKTADIEIKRGLFQGDTLSPLWFCLALNPLSALINNQKYGYILDRIKKIKITHQLYIDDLKLYASNDEELAKQIQIVATFSEAIRMQMGLDKCARLTVKRGKISESDSSFLDQDAIQTLDKGETYKYLGIQQALEIKNAEMKEAFTKKLLWRVGQLLRSKLNSRSLFLALNTWAMPIMTYTFGVLTWSTTELQALDTKIRTILTKYGVHHPHSSVARLYLQRHLGGRGLVNLETAHNKTVIRLREYFMQQNSPYFRTLRAIDVGCSPLRLSDSGFAPPVRTQQSFREEWKAKALHGRYPNNLENNNVNKAESLTYMKAGYLFPETEGRLLAIQDQVVPTRSYLKNIAGQHLTTDLCRKCGQGREHIQHVTSGCSILAPREYTDRHNQMAKIYHQAIALKYNLLKVKKKNHLYLPEGVLENESYKLYWDTTIVTERPVANNRPDIVLFKKESKICYIIDITVPSDDNISRAYTEKISKYYDLSFNLKEMYQLKQVTVVPLVVSVNGLVEEHLSVNTMLLELDGYVISSAQKEVILGTTRIVRRFLHCS

SEQ ID NO: 32903 - protein, 1103 aa, Coccinella septempunctata
MRWTHVDNSTAIRAHFIAMRIAGGRGKTYMRTLNEIWNDMRPDRRTYAQHIANRVRWILDEEKLPRTELRTIERTCWPDRILREENTDISPVSDHREEQEDAEDENVRGEDTDPQDQISVGFDRNLIKFSGMDPKSRQKIPRLKQNKKLMEDVRAVDKILSKLLRRDDTLIQVVDLVYAGAITVAELQGKTTSNNPERPSGDPPWKKRLERNINQHRSKLGIIQTYLSTQQPSRKVLRSMRVIARECKLRFTADDFRSKIKVTADNLKQKIKALGSRLRRYNERTKRYKNNRLYYANQKEFFRKLEGKMNTDGPPPTPEAVEGFWKGIWSEEVSHDGDADWLQEVVDQSRGEMMREIQIDVADIEWVLKSTNNWAAPGVDNIHNFWWKHFRSVHSSLARLFQKFLEKPELVPGFLTAGLTYMLPKGAESEDPKNYRPVTCLPTIYKLLTGVLTRHINNHVRSHNILATEQNGCKSKAMGAKELLITDVIITKHARKKLRNISVAWVDYKKAFDSVPHTWLLKVLSMYGVCGSVINLLKHLMSEWRTSLILRTGATIIKTADIAIRRGLFQGDTLSPLWFCLALNPLSMLINKQKYGYILDKNRKVKITHQLFIDDLKLYASNEEQLEKMLEIVATFSETIKMEMGLDKCARLTVKRGKIIENNSNILNPNAIQNLGRDETYKYLGIQQALEIKNAEMKEAFSKKLFYRVNQVLKSKLNSKSLFLALNTWALPIMTYTFGILTWSATELQALDTKIRTILTKYGVHHPHSSVARLYLQRHLGGRGMLNLETTHDKSVLKLREYFMKQNSPFVRTLRSVDVGCSPLRLSDSDFTQPIRTQQNLQEEWKAKVLHGRYPNNLENNNVNKKESLTYLKAGYLFPETEGRLLAIQDQVVPTRSYLKNIAGQQLTSDLCRKCKQGREHIQHVTSGCSILAPREYTDRHNQMAKVYHQAMALKLKLIKTKRKNHLYLPENVLENEEFKLYWDTTMVTDRPVANNRPDIVLLNKREKSCVIIDITVPSDDNISRAYTEKLTKYFDLSFELKEMYRLKKISIIPLVMSVNGLVEEHLVDNTKLLELDSYVVSSAQKEVILGTTRIVRRFLHSS

SEQ ID NO: 32904 - protein, 1232 aa, Harmonia axyridis
MRRKRDILYKAKMIVPMSSTRIYTFVQFMMKHPVYRGSFGFRGETTTRTLVDHRSRIATWIVCGIRNALASHSNTQGGGELRAGSLRNRPEDQLDGGSGGVSGAYLRSGTVRQRPAQTSEGEDGLAVSLDRPTTSQQQQTHQDRRMRWTHVDNSTAIRAHFIAEIWNNMRPDRRTYAQHKANRVRWILDEEKLPRTELRMIERTCWPDRILREDNTEIPPVCDHHEEQETTEDNENVRGEDTDPQDQIRTIFNRNLIKFSGMDPKSRQKIPRLKTNKKLIEDVKALDNILSKLLKRDDTLIEVVELVYAGAITVAELQGTTSNNPERPSGDPPWKKRLERNINQHRSKLGIIQTNLSTQQPSRKVLRSVGMIARECKLRFTADDFRSKIKVTADNLKQEIKALGSRLRRYNERTKRYKNNRLYYVNQKEFFRNLEGKVNTAGPPSTREAMEGFWKGIWIEEVNHDEGADWLREIEDQSRVEMMREIQIDVADVEWVLKSTNNWAAPGVDNIHNFWWKHFRSVHSSLARLFQQLLEKPELVPGFMTAGLTYMLTKGAESKDPKNYRPVTCLPTIYKLLTGVLTRHINNHVRSHNILATEQNGCKSKAMGAKELLITDVIISKHARKKLRNISVAWVDYKKAFDSVPHTWLLKVLSMYGVCGSVINLLKHLMSEWRTSLILKTGATIIKTAGIAIRRGLFQGDSLSPLWFCLALNPLSTLINEQKYGYILDKNRKIKITHQLYIDDLKLYASNEEQLEKMLEIVATFSETIRMEMGLDKCARLKVKRGKISENDSNILNPNAIQNLGMDETYTYLGIQQALEIKNAEMKEAFSEKLFHRVNQVLKSKLNSKSLFLALNTWALPIMTYTFGVLTWSTTELQALDTKIRTILTKYGVHHPHSSVARLYLQRHLGGRGMLNLETSHNKSVIKLREYFMKQNLPFVRALRSVDVGCSPLRLSDSDFALPIRTQQNLQEEWKAKVLHGRYPNNLDNSNVNKKESLTYLKAGYLFPETEGRLLAIQDQVIPTRSYLKNIAGQQLTSDLCRKCKLGREHIQHVTSGCSILAPREYTDRHNQMAKVYHQAMALKLKLIKTKRKNHLFSPENVLENEEFKLYWDTTMVTDRPVANNRPDIVLLNKTEKTCEIIDITVPSDDNNSRAYTEKITKYFDLSFELKEMYKLKKISIIPLVMSVNGLVEEHLVDNTKMLELDIYVVSSAQKEAILGTTRIVRRFFHSS

SEQ ID NO: 32905 - protein, 954 aa, Propylea japonica
MEDVRAVDKILSKLLRRDDTLIQVVDLVYAGAITVAELQGKITANNPERPSGDPPWKKRLERNINQHRSKLGIIQTYLSTQQPSRKVLRSMRVIARECKLRFTADNFRSKIKVTADNLKQKIKALGSRLRRYNERTKRYKNNRLYYANQKEFFRNLEGKMNTDGPPPTPEAVEGFWKGIWSEEVSHGGDAEWLQEVEDQSRGEMMREIQIDVADIEWVLKSTNNWAAPGVDNIHNFWWKHFRSVHSSLARLFQKFLEKPELVPSFLTAGLTYMLPKGAESEDPKNYRPVTCLPTIYKLLTGVLTRHINNHVRSHNILATEQNGCKSKAMGAKELLITDVIITKHARKKLRNISVAWVDYKKAFDSVPHTWLLKVLSMYGVCGSVINLLKHLMSEWRTSLILRSGATTIKTADIAIRRGLFQGDTLSPLWFCLALNPLSMLINKQKYGYILDKNRKIKITHQLFIDDLKLYASNEEQLEKMLEIVATFSGTIKMEMGLDKCARLTVKRGKIIENNSDILNPNAVQNLGRDETYKYLGIQQALEIKNAEMKEAFSKKLFYRVNQVLKSKLNSKSLFLALNTWALPIMTYTFGILTWSATELQALDTKIRTILTKYGVHHPHSSVARLYLQRHLGGRGMLNLETTHNKSVLKLREYFMKQNSPFVRTLRSVDVGCSPLRLSDSDFTQPIRTQQNLQEEWKAKALHGRYPNNLENNNVNKKESLTYLKAGYLFPETEGRLLAIQDQVVPTRSYLKNIAGQQLTSDLCRKCKQGREHIQHVTSGCSILAPIEYTDRHNQMAKVYHQAMALKLKLIKTKRKNHLYLPESVLENEDFKLYWDTTMVTDRPVANNRPDIVLLNKRGKSCVIIDITVPSDDNISRAYTEKITKYFDLSFELKEMYKLKKISIIPLVMSVNGLVEEHLVDNTKLLELDNYVVSSAQKEVILGTTRIVRRFLHSS

SEQ ID NO: 32906 - protein, 1074 aa, Coccinella septempunctata
MRWTHVDNSTAIRAHFIAMRIAGGRGKTYMRTLNEIWNDMRPDRRTYAQHIANRVRWILDEEKLPRTELRTIERTCWPDRILREENTDISPVSDHREEQETAEDENVRGEDTDPQDQISVGFDRNLIKFSGMDPKSRQKIPRLKQNKKLMEDVRAVDKILSKLLRRDDTLIQVVDLVYAGAITVAELQGKTTSNNPERPSGDPPWKKRLERNINQHRSKLGIIQTYLSTQQPSRKVLRSMRVIARECKLRFTADDFRSKIKVTADNLKQKIKALGSRLRRYNERTKRYKNNRLYYANQKEFFRKLEGKMNTDGPPPTPEAVEGFWKGIWSEEVSHDGDAEVVDQSRGEMMREIQIDVADIEWVLKSTNNWAAPGVDNIHNFWWKHFRSVHSSLARLFQKFLEKPELVPSFLTAGLTYMMPKGAESEDPKNYRPVTCLPTIYKLLTGVLTRHINNHVRSHNILATEQNGCKSKAMGAKELLITDVIITKHARKKLRNISVAWVDYKKAFDSVPHTWLLKVLSMYGVCGSVINLLKHLMSEWRTSLILRTGATIIKTADIAIRRGLFQGDTLSPLWFCLALNPLSMLINKQKYGYILDKNRKVKITHQLFIDDLKLYASNEEQLEKMLEIVATFSETIKMEMGLDKCARLTVKRGKIIENNSNILNPNAIQNLGRDETYKYLGIQQALEIKNAEMKEAFSKKLFYRVNQVLKSKLNSKSLFLALNTWALPIMTYTFGILTWSATELQALDTKIRTILTKYGVHHPHSSVARLYLQRHLGGRGMLNLETTHDKSVLKLREYFMKQNSPFVRTLRSVDVGCSPLRLSDSDFTQPIRTQQNLQEEWKAKVLHGRYPNNLENNNVNKKESLTYLKAGYLFPETEGRLLAIQDQVVPTRSYLKNIAGQQLTSDLCRKCKQGREHIQHVTSGCSILAPREYTDRHNQMAKVYHQAMALKLKLIKTKRKNHLYLPENVLENEEFKLYWDTTMVTDRPVANNRPDIVLLNKREKSCVIIDITVPSDDNISRAYTEKLTKYFDLSFELKEMYRLKKISIIPLVMSVNGLVEEHLVDNTKLLELDS

SEQ ID NO: 32907 - protein, 1123 aa, Apolygus lucorum
MANNNYNINSATGSVRPVVDQEGTLGNPQAGAPAGTVGPAAASLASGSSVHVCTVCSRSFSSSVGLGVHFRRAHPVAANEAINIERTCLRWAQEELRLMATEEARAAGVRFMNVHLQQFLPNRSVEAIKCIRRRRDYKDMVAAASLRIRGEFAVDAEEHSSLDSETVEGDSGGSQMSDVMPSRSHNVGIFDEELRVDGVDPGNDGRSSSLQPPHGSAILEVIERLITECREGAVGVEWDLGALTSLTSLVGRQLANGVADYVGVVLGHSRVEVRPGVLRPVTERETSGQVASQRRPGDHESNRRRRMRERRAEYARIQQLWKSQLDQAAKEILGEDSGSGTGQLSLQEFDTFWRPVLEDVGRVCPFPVVTPANTVNPSLAMIMDGPVTAEEEAATRIPQRSAPGPDGLQVKQWMSIPVKIRIILLNMLLLAGVPPREYCKSRTVFVPKSGGAGPGGFRPISVSPVPLRHLHKVLVSRLLSADVVSVSQRGFRRADGCGEDLTIIKACLDLSQTRHKQLHLASLDVSKAFDTVTHAAITDCLRGVGAPRRFVEYVSALYQDSRTVLQVGGRLGSDIVAGRGVRQGDPLSPLLFNLVIDSAIAKLPPEVGFDIEEGAVSGTRVSSLAFADDVVLLAGTRQGMQLALDVFTDQLIKCGLSLNVNKSASLSLMPSGRDKKTKVVDGRFLVPVDDAAASTAVLPARSVVEVWKYLGVGFAGATTARAAAQYLENMLQRVSRAPLKPQQRLRLLTCYLLPKLSYGLTFGRVALARLRRIDIRVRSAVRQWLKLPKDVPNAYFHAPTKEGGLGINAMVVCIPRFRENRLKALERSTWDVARVVAHLPVVHKDLTWCNKVLSGWLPDPAKEMASRLHCSVDGRELRESSKCGASTAWVYQTAEGIPAADYRHYHQVRIGALPTKVRTRRGIGGGEKSCRACAAPAETPAHVIQMCPRTHGGRIKRHDAVVGLLAETLARRGWSVEKEVLFRLGREALKPDLVAVHHDGACKVIDVQVVAASQGLSGAFQAKVAKYKRADLLGAVGARHGVGLEGIEVIACTISWRGVWCRASSEALKKIGVPMGTLRGITTRVLMGSWLNLRTFMRGTSAHHGVGVRGRGGGAQPGMGVGR

SEQ ID NO: 32908 - protein, 1123 aa, Apolygus lucorum
MANNNHNINSATGSVRPVVDQEGTLGNPQAGAPAGTVGPAAASAASGSSVHVCTVCSRSFSSSVGLGVHFRRAHPVAANEAIDIERTCLRWAQEELRLMATEEARAAGVRFMNVHLQQFLPNRSVEAIKCIRRRRDYKDMVAAASLRIRGEFAVDAEEHSFLDSETVEGDSGGSQMSDVMPSTSHNVGIFDEELRVDGVVPGNDGRSSSLRPPHGSAILEVIERLITECREGAVGVEWDLGALTSLTSLVGRQLANGVADYVGVVLGHSRVEVRPGVLRPVTVRETSGQVASQRRPGDHESNRRRRMRERRAEYARIQQLWKSRPDQAAKEILGEDSGSGTGQLSLQEFDSFWRPVLEDVGRVCPFPVVTPANTVNPSLAMIMDRPVTAEEEAATRIPQRSAPGPDGLQVKQWMSIPVKIRIILLNMLLLAGVPPREYCKSRTVFVPKSGGTGPGGFRPISVSPVPLRHLHKVLASRLLSADVVSVTQRGFRRADGCGEDLTIIKACLDLSQTRHKQLHLASLDVSKAFDTVTHAAITDCLRGVGAPRRFVEYVSALYQDSRTVLQVGGRLGSDIVAGRGVRQGDPLSPLLFNLVIDSAIAKLPPEVGFDIEEGAVSGTRVSSLAFADDVVLLAGTRQGMQLALNVFTDQLIKCGLSLNVNKSATLSLMPSGRDKKTKVVEGRFLVPVDDAAASTAVLPARSVVEVWKYLGVGFAGATTARAAAQYLENMLQRVSRAPLKPQQRLRLLTCYLLPKLSYGLTFGRVALARLRRIDIRVRSAVRQWLKLPKDVPNAYFHAPTKEGGLGINAMVVCIPRFRENRLKALERSTWDVARVVAHLPVVHKDLTWCNKVLSGWLPDPAKEMASRLHCSVDGRELRESSKCGASTAWVYQTAEGIPAADYRHYHQVRIGALPTKMRTRRGIGGGEKSCRACAAPAETPAHVIQMCPRTHGGRIKRHDAVVGLLAETLARRGWSVEKEVLFRLGREALKPDLVAVHHDGTCKVIDVQVVAASQGLSGAFQAKVAKYKRVDLLGAVGARHGVGLEGIEVIACTISWRGVWCRASSDALKKIGVPMGTLKGITTRVLMGSWLNLRTFMRGTSAHHGVGVRGRGGGAQPGMGVGR

SEQ ID NO: 32909 - protein, 1123 aa, Apolygus lucorum
MANNNYNINSATGSVRPVVDQEGTLGNPQAGAPAGTVGPAAASAASGSSVHVCTVCSRSFSSSVGLGVHFRRAHPVAANEAIDIERTCLRWAQEELRLMATEEARAAGVRFMNVHLQQFLPNRSVEAIKCIRRRRDYKDMVAAASLRIRGEFAVDAEEHSSLDSETVEGDSGGSQMSNVMPSTSHNVGIFDEELRVDDVDPGNDGRSSSLQPPHGSAILEVIERLITECREGAVGVEWDLGALTSLTSLVGRQLANGVADYVGVVLGHSRVEVRPGVLRPVTERETSGQVASQRRPGDHESNRRRRMRERRAEYARIQQLWKSRPDQAAKEILGEDSGSGTGQLSLQEFDSFWRPVLEDVGRVCPFPVVTPANTVNPSLAMIMDGPVTAEEEAATRIPQRSAPGPDGLQVKQWMSIPVKIRIILLNMLLLAGVPPREYCKSRTVFVPKSGGAGPGGFRPISVSPVPLRHLHKVLASRLLSADVVSVSQRGFRRADGCGEDLTIIKACLDLSQTRHKQLHLASLDVSRAFDTVTHAAITDCLRGVGAPRRFVEYVSALYQDSRTVLQVGGRLGSDIVAGRGVRQGDPLSPLLFNLVIDSAIAKLPPEVGFDIEEGAVSGTRVSSLAFADDVVLLAGTRQGMQLALDVFTDQLIKCGLSLNVNKSASLSLMPSGRDKKTKVVEGRFLVPVDDAAASTAVLPARSVVEVWKYLGVGFAGATTARAAAQYLENMLQRVSRAPLKPQQRLRLLTCYLLPKLSYGLTFGRVALARLRRIDIRVRSAVRQWLKLPKDVPNAYFHAPTKEGGLGINAMVVCIPRFRENRLKALERSTWDVARVVAHLPVVHKDLTWCNKVLSGWLPDPAKEMASRLHCSVDGRELRESSKCGASTAWVYQTAEGIPAADYRHYHQVRIGALPTKVRTRRGIGGGEKSCRACAAPAETPAHVIQMCPRTHGGRIKRHDAVVGLLAETLARRGWSVEKEVLFRLGREALKPDLVAVHHDGACKVIDVQVVAASQGLSGAFQAKVAKYKRADLLGAVGARHGVGLEGIEVIACTISWRGVWCRASSEALKKIGVPMGTLRGITTRVLMGSWLNLRTFMRGTSAHRGVGVRGRGGGAQSGMGVGR

SEQ ID NO: 32910 - protein, 934 aa, Hormaphis cornu
MNQELLKYTNRTLEAVKGHRRKDTYKASVQRFLHELNDNFSDDDQVSDDDSANSSSEGEPMDHLNDDDKIGVFLLGLHCVNSDSHDGRWLHKICKMTENQNKERVLIELGTYLKKVFPSSIKKLANHGTPSRRPTPLNRKTKRRAEYARVQDLWKKNHGDCTNRILTDTTEQPNLPELPVEVVYDYWETVLTKDSHSAPDLPAEQPSVGKLWDPISIEELRTAFPSSDSAPGPDGLTAKTLRGTPPEILVRIFSLFMWCGKLPAYLNESRTVLIPKKKAINHPNELRPITMSSVLIRCFHKVLASRLRSICLDERQRAFLRADGCAENITLLDMVLKFHRKKSKKLFLAILDMAKAFDSVTLEALQSTLRTKGLPPSMISYVTSTYTSASTVLQYGGRCSKKMHPKCGVKQGDPLSPILFNFVMDEMLKRITPEIGVEMDNIKLNILAFADDLVLMASTERGLQSLINQVAGYLHQCGLTANASKCSTLALKNVPKEKRLAVDSSCKFKINNTVIPSLKRTDRWNYLGIPFTADGRADIRIVEDLVEKLARISKAPLKPQQRLWALVHVVIPSIKYQLTLGNVKLGYLRTVDRTVRAALRGWLHLPKDCPNGYFHASVADGGLGVDSLRWRGPFERLHRLKKIETSSYITDRDTIGFIDEEIRLTSLRLKDNTNTILKTKKLLRNFWARLLHGSVDGAALKKSSEVRAQHSWVGDATRFLSGRDYINSIKLRINALPSASRTSRGRVRDKSCRAGCAAIETTNHILQVCPRAHGVRIKRHNAVVTYLARNLRRSGYEVDIEPQFQTDDGVRKPDVVATMGRTSLVVDAQVVSEQANLDTANENKIRYYRDNQSLAARIKEKYESSDILTLAATLNWRGVWSKSSATSLLEKGIISKGDIKVLSSRVLVGGLALWNTWNRTTGRGARRMDRQGIG

SEQ ID NO: 32911 - protein, 1038 aa, Blattella germanica
MLHFSCLFCLVTYLRFVIWCYFSDLACHFSLMEEASLSCPLCKSLLNSSDSLLLLCHRCLSWFHSSCLGLQDEEVENRATSNSSWSCPQCVSLEDPNDSISTCLDFVACPVCIDKSFKGKKGLRIHWARAHPDQPFTSPDLPSSSVHDSLPYKLAYCKDNIPVLRRIPKGARFFAAEKLSQVIDRCVAQNSVNCWSDLLMFPYIAFRVPNKVNNRYTSSLVSCIKENLREFKLTSPPSKKHRNLSSKARLIEEKVSDGDLRGAVRILSSDLSISTNTQSALIALSAKHPPPSRPLSFPDPPTSDGHNLSFSQDLVLQSILNFPSGSASGIDGFRPQHLKDLVSSSAGDSGKHLLTSITKLCNFLLEGRLTSEICPLLYGASLIALGKKDGGIRPIAIGNVFRRLVAKLACVSVRNAAGDILSPVQLGFGTKNGCEIIIHSVRTFLNLHANSQKVLLKIDYANAFNCIERDSLLCNIKEKIPKLYAFLWQAYRNESELFFKSDILSSCRGVQQGDPLGPLIFSLALHPIIEKLKSDLKLFYLDDGCLIGDPTTVLSDFIHIVEASKSIGLEINPNKCELFFCSNTDHAILSSFNAIAPGIKTVEKSDLSLLGSPIFRDAIELATKETLSKLTHLFENLQGLHPHIAFFLLKNCLAIPKLTYFLRTTPLWFLPSILKETDGLFKACLESILNLQLDDKSWSLASLPISFGGLGIRRLSDICIPAFLASAFGCSDFIKSQILNYGDESEIHLLSEALLHWNMLTDSQDPPLRLTVQKDWDHIISSKLYNTLMSTCSTPSDKARLLAIKVKEAKAWLAALPSKNIGTLMDPLSFRIAIALRLGCKICHQHQCICGSQADSFGHHALSCRKSYGRFSRHSAINDILKRALSSLGIPSILEPIGINRSDGKRPDGLTLISWSKGKPLLWDATCVDTLSASYLNSTSKVAGSAADLAVQKKNNKYRDLVDNYHFVAFAVETFGPWCSEAKNLVNSIGHQLQSLNKDPRSTSYLYQRIGIIIQKGNAASIMGTFPSTASLDEIFYF

SEQ ID NO: 32912 - protein, 1146 aa, Morbakka virulenta
MSVMLNIRLSNNGVNEGGATCEALSPGRCPTAQQRGSGRQPVTARRIRKKWSYEENRIVMECFFRSNPKVNGYRKRMHNIWKDMGMFQITEQHLLDQKAQITKKKWLTDLELEEIKRLIEDAECGITGNVISEERDEHAEREAEINADEGDRNVNETIRTRDFVVDRDQNEIDEKQKGILLQLNEIQGRERKRLPALRGVERKRLSDALNTVDEVLSKVKVTDITEVNDLIYCGAALVTEMLGIKTCRNNKKEPLWKRRLENQLKVLNKDLSRVNMLIERRKVKKKHEDLLQKRYNIKQRGLQTTKEIIFQRSKTKAAKIKRYNQRISQFQQNRLFSNNEGRFYQQLNNDQGWEESEAPDPEEARTFWSDIWSKEGKHKKDAVWLKGFYEEVKEVVGQEEIHITENTIKKILRKFPNWKAPGPDGVQGFWLKKFRSMHTQLASSLRKCLEEGKTPLWMTKGRTVLIQKDKSKGTVASNYRPITCLPLAWKLLTGIFSDEIYRYLEGQELLPEEQKGCRRKSKGTGDLLYIDKMILKEVKQRRKNLSMAWVDYRKAYDMIPHSWLMECLAALKVNQNIRNLLSETMKSWRVELMCKDETLGEVRIKRGIFQGDALSPLLFVISMIPLTSMLRKAAHGYEFSSSKVKINHLLYMDDLKLYGKTQKDLESLIQTVRIYSSDIGMEFGLEKCASLVTKRGKIVESDGITLPDDKMIKNLKEYESYKYLGVQELDDIKTSEMKERVSKEYKRRVRKVLETKLNGNNIIKAINTWAVSVVRYSAPFLDWRKEEVQGLDRSTRKLMTMHKALHPKSNVDRLYISRNEGGRGLLSVEDTIETSKIGLERYVQENKEQLLSAARRSDMEVKETVKQYKDQRAKERKKNWKEKVLHGQFIRQTEEIAGEERWKWLKNSGIKRETETLILAAQEQAIRTNLIKAKIDKTQEDSRCRMCGKVDETINHLISECSKMAQKEYKNRHDWVGRRIHWDICRKFGVHVSEKWYNHKPESVIENDTCKVLWDFTIQTDHVIEARRPDLILIKKEDNNCIIVDFAIPYDTRIEQKEKEKVEKYQDLKRELQKIWNMKVKVVPIVIGALGTPPKDIKRRVEELGIETRIEEMQKIVILQSARILRKVLEIEETCCHQYQGDITAE

SEQ ID NO: 32913 - protein, 1131 aa, Morbakka virulenta
MSVMLNIRLSNNGVNEGGATCEALSPGRCPTAQQRGSGRQPVTARRIRKKWSYEENRIVMECFFRSNPKVNGYRKRMHNIWKDMGMFQITEQHLLDQKAQITKKKWLADLELEEIKRLIEDAECGITGNVISEERDEHAEREAEINADEGDRNVNETIRTRDFVVDRDQNEIDEKQKGILLQLNEIQGRERKRLPALRGVERKRLSDALNTVDEVLSKVKVTDITEVNDLIYCGAALVTEMLGIKTCRNNKKEPLWKRRLENQLKVLNKDLSRVNMLIERRKVKKKHEDLLQKRYNIKQRGLQTTKEIIFQRSKTKAAKIKRYNQRISQFQQNRLFSNNEGRFYQQLNNDQGWEESEAPDPEEARTFWSDIWSKEGKHKKDAVWLKGFYEEVKEVVGQEEIHITENTIKKILRKFPNWKAPGPDGVQGFWLKKFRSMHTQLASSLRKCLEEGKTPLWMTKGRTVLIQKDKSKGTVASNYRPITCLPLAWKLLTGIFSDEIYRYLEGQELLPEEQKGCRRKSKGTGDLLYIDKMILKEVKQRRKNLSMAWVDYRKAYDMIPHSWLMECLAALKVNQNIRNLLSETMKSWRVELMCKDETLGEVRIKRGIFQGDALSPLLFVISMIPLTSMLRKAAHGYEFSSSKVKINHLLYMDDLKLYGKTQKDLESLIQTVRIYSSDIGMEFGLEKCASLVTKRGKIVESDGITLPDDKMIKNLKEYESYKYLGVQELDDIKTSEMKERVSKEYKRRVRKVLETKLNGNNIIKAINTWAVSVVRYSAPFLDWRKEEVQGLDRSTRKLMTMHKALHPKSNVDRLYISRNEGGRGLLSVEDTIETSKIGLERYVQENKEQLLSAARRSDMEVKETVKQYKDQRAKERKKNWKEKVLHGQFIRQTEEIAGEERWKWLKNSGIKRETETLILAAQEQAIRTNLIKAKIDKTQEDSRCRMCGKVDETINHLISECSKMAQKEYKNRHDWVGRRIHWDICRKFGVHVSEKWYNHKPESVIENDTCKVLWDFTIQTDHVIEARRPDLILIKKEDNNCIIVDFAIPYDTRIEQKEKEKVEKYQDLKRELQKIWNMKVKVVPIVIGALGTPPKDIKRRVEELGIETRIEEMQKIVILQSARILRKVLEN

SEQ ID NO: 32914 - protein, 857 aa, Morbakka virulenta
MLIERRKVKKKHEDLLQKRYNIKQRGRLQTTKEIISQRSKTKAAKIKRYKQRISQFQQNRLFRNNEGRFYQQLNDDQGWEESEAPDPEEARTFWSDIWSKEGKHKKDAVWLKGFYEEVKEVGGQEEIHITENTIKKILRKFPNWKAPGPDGVQGFWLKKFRSMHTQLASSLRKCLEEGKTPLWMTKGRTVLIQKDKSKGTVASNYRPITCLPLAWKLLTGIFSDEIYRYLEGQELLPEEQKGCRRKSKGTGDLLYIDKMILKEVKQRRKNLSMAWVDYRKAYDMIPHSWLMECLAALKVNQNIRNLLSETMKSWRVELMCKDETLGEVRIKRGIFQGDALSPLLFVISMIPLTSMLRKAAHGYEFSSSKVKINHLLYMDDLKLYGKTQKDLESLIQTVRIYSSDIGMEFGLEKCASLVTKRGKIVESDGITLPDDKMIKNLKEYESYKYLGVQELDDIKTSEMKERVSKEYKRRVRKVLETKLNGNNIIKAINTWAVSVVRYSAPFLDWRKEEVQGLDRSTRKLMTMHKALHPKSNVDRLYISRNEGGRGLLSVEDTIETSKIGLERYVQENKEQLLSAARRSDMEVKETVKQYKDQRAKERKKNWKEKVLHGQFIRQTEEIAGEERWKWLKNSGIKRETETLILAAQEQAIRTNLIKAKIDKTQEDSRCRMCGKVDETINHLISECSKMAQKEYKNRHDWVGRRIHWDICRKFGVHVSEKWYNHKPESVIENDTCKVLWDFTIQTDHVIEARRPDLILIKKEDNNCITVDFAIPYDTRIEQKEKEKVEKYQDLKRELQKIWNMKVKVVPKVIGALGTPSKDAKRREEELGIETRIEEMQKIVILQSARILRKVLEN

SEQ ID NO: 32915 - protein, 1149 aa, Morbakka virulenta
MIIIIITIIIIIITTILNMSVMLNIRLSNNGVNEGGATCEALSPGRCPTAQQRGSGRQPVTARRIRKKWSYEENRIVMECFFRSNPKVNGYRKRMHNIWKDMGMFQITEQHLLDQKAQITKKKWLTDLELEEIKRLIEDAECGITGNVISEERDEHAEREAEINADEGDRNVNETIRTRDFVVDRDQNEIDEKQKGILLQLNEIQGRERKRLPALRGVERKRLSDALNTVDEVLSKVKVTDITEVNDLIYCGAALVTEMLGIKTCRNNKKEPLWKRRLENQLKVLNKDLSRVNMLIERRKVKKKHEDLLQKRYNIKQRGLQTTKEIIFQRSKTKAAKIKRYNQRISQFQQNRLFSNNEGRFYQQLNNDQGWEESEAPDPEEARTFWSDIWSKEGKHKKDAVWLKGFYEEVKEVVGQEEIHITENTIKKILRKFPNWKAPGPDGVQGFWLKKFRSMHTQLASSLRKCLEEGKTPLWMTKGRTVLIQKDKSKGTVASNYRPITCLPLAWKLLTGIFSDEIYRYLEGQELLPEEQKGCRRKSKGTGDLLYIDKMILKEVKQRRKNLSMAWVDYRKAYDMIPHSWLMECLAALKVNQNIRNLLSETMKSWRVELMCKDETLGEVRIKRGIFQGDALSPLLFVISMIPLTSMLRKAAHGYEFSSSKVKINHLLYMDDLKLYGKTQKDLESLIQTVRIYSSDIGMEFGLEKCASLVTKRGKIVESDGITLPDDKMIKNLKEYESYKYLGVQELDDIKTSEMKERVSKEYKRRVRKVLETKLNGNNIIKAINTWAVSVVRYSAPFLDWRKEEVQGLDRSTRKLMTMHKALHPKSNVDRLYISRNEGGRGLLSVEDTIETSKIGLERYVQENKEQLLSAARRSDMEVKETVKQYKDQRAKERKKNWKEKVLHGQFIRQTEEIAGEERWKWLKNSGIKRETETLILAAQEQAIRTNLIKAKIDKTQEDSRCRMCGKVDETINHLISECSKMAQKEYKNRHDWVGRRIHWDICRKFGVHVSEKWYNHKPESVIENDTCKVLWDFTIQTDHVIEDRRPDLILIKKEDNNCIIVDFAIPYDTRIEQKEKEKVEKYQDLKRELQKIWNMKVKVVPIVIGALGTPPKDIKRRVEELGIETRIEEMQNIVILQSARILRKVLEN

SEQ ID NO: 32916 - protein, 1131 aa, Morbakka virulenta
MSVMLNIRLSNNGVNEGGATCEALSPGRCPTAQQRGSGRQPVTARRIRKKWSYEENRIVMECFFRSNPKVNGYRKRMHNIWKDMGMFQITEQHLLDQKAQITKKKWLTDLELEEIKRLIEDAECGITGNVISEERDEHAEREAEINADEGDRNVNETIRTRDFVVDRDQNEIDEKQKGILLQLNEIQGRERKRLPALRGVERKRLSDALNTVDEVLSKVKVTDITEVNDLIYCGAALVTEMLGIKTCRNNKKEPLWKRRLENQLKVLNKDLSRVNMLIERRKVKKKHEDLLQKRYNIKQRGLQTTKEIIFQRSKTKAAKIKRYNQRISQFQQNRLFSNNEGRFYQQLNNDQGWEESEAPDPEEARTFWSDIWSKEGKHKKDAVWLKGFYEEVKEVVGQEEIHITENTIKKILRKFPNWKAPGPDGVQGFWLKKFRSMHTQLASSLRKCLEEGKTPLWMTKGRTVLIQKDKSKGTVASNYRPITCLPLAWKLLTGIFSDEIYRYLEGQELLPEEQKGCRRKSKGTGDLLYIDKMILKEVKQRRKNLSMAWVDYRKAYDMIPHSWLMECLAALKVNQNIRNLLSETMKSWRVELMCKDETLGEVRIKRGIFQGDALSPLLFVISMIPLTSMLRKAAHGYEFSSSKVKINHLLYMDDLKLYGKTQKDLESLIQTVRIYSSDIGMEFGLEKCASLVTKRGKIVESDGITLPDDKMIKNLKEYESYKYLGVQELDDIKTSEMKERVSKEYKRRVRKVLETKLNGNNIIKAINTWAVSVVRYSAPFLDWRKEEVQGLDRSTRKLMTMHKALHPKSNVDRLYISRNEGGRGLLSVEDTIETSKIGLERYVQENKEQLLSAARRSDMEVKETVKQYKDQRAKERKKNWKEKVLHGQFIRQTEEIAGEERWKWLKNSGIKRETETLILAAQEQAIRTNLIKAKIDKTQEDSRCRMCGKVDETINHLISECSKMAQKEYKNRHDWVGRRIHWRIYRKFGVHVSEKWYNHKPQSVIENDTCKVLWDFTIQTDHVIEARRPDLILIKKEDNNCIIVDFAIPYDTRIEQKEKEKVEKYQDLKRELQKIWDMKVKVVPIFIGALGTPPKDIRRRVEELGFETRIEEMQKIVILQSARILRKVLEN

SEQ ID NO: 32917 - protein, 1082 aa, Morbakka virulenta
MSVMLNIRLSNNGVNEGGATCEALSPGRCPTAQQRGSGRQPVTARRIRKKWSYEENRIVMECFFRSNPKVNGYRKRMHNIWKDMGMFQITEQHLLDQKAQITKKKWLTDLELEEIKRLIEDAECGITGNVISEERDEHAEREAEINADEGDRNVNETIRTRDFVVDRDQNEIDEKQKGILLQLNEIQGRERKRLPALRGVERKRLSDALNTVDEVLSKVKVTDITEVNDLIYCGAALVTEMLGIKTCRNNKKEPLWKRRLENQLKVLNKDLSRVNMLIERRKVKKKHEDLLQKRYNIKQRGLQTTKEIIFQRSKTKAAKIKRYNQRISQFQQNRLFSNNEGRFYQQLNNDQGWEESEAPDPEEARTFWSDIWSKEGKHKKDAVWLKGFYEEVKEVVGQEEIHITENTIKKILRKFPNWKAPGPDGVQGFWLKKFRSMHTQLASSLRKCLEEGKTPLWMTKGRTVLIQKDKSKGTVASNYRPITCLPLAWKLLTGIFSDEIYRYLEGQELLPEEQKGCRRKSKGTGDLLYIDKMILKEVKQRRKNLSMAWVDYRKAYDMIPHSWLMECLAALKVNQNIRNLLSETMKSWRVELMCKDETLGEVRIKRGIFQGDALSPLLFVISMIPLTSMLRKAAHGYEFSSSKVKINHLLYMDDLTLYGKTQKDLESLIQTVRIYSSDIGMEFGLEKCASLVTKRGKIVESDGITLPDDKMIKNLKEYESYKYLGVQELDDIKTSEMKERVSKEYKRRVRKVLETKLNGNNIIKAINTWAVSVVRYSAPFLDWRKEEVQGLDRSTRKLMTMHKALHPKSNVDRLYISRNEGGRGLLSVEDTIETSKIGLERYVQENKEQLLSAARRSDMEVKETVKQYKDQRAKERKKNWKEKVLHGQFIRQTEEIAGEERWKWLKNSGIKRETETLILAAQEQAIRTNLIKAKIDKTQEDSRCRMCGKVDETINHLISECSKMAQKEYKNRHDWVGRRIHWDICRKFGVHVSEKWYNHKPESVIENDTCKVLWDFTIQTDHVIEARRPDLILIKKEDNNCIIVDFAIPYDTRIEQKEKEKVEKYQDLKRELQKIWNMKVKE

SEQ ID NO: 32918 - protein, 1131 aa, Morbakka virulenta
MSVMLNIRLSNNGVNEGGATCEALSPGRCPTAQQRGSGRQPVTARRIRKKWSYEENRIVMECFFRSNPKVNGYRKRMHNIWKDMGMFQITEQHLLDQKAQITKKKWLTDLELEEIKRLIEDAECGITGNVISEERDEHAEREAEINADEGDRNVNETIRTRDFVVDRDQNEIDEKQKGILLQLNEIQGRERKRLPALRGVERKRLSDALNTVDEVLSKVKVTDITEVNDLIYCGAALVTEMLGIKTCRNNKKEPLWKRRLENQLKVLNKDLSRVNMLIERRKVKKKHEDLLQKRYNIKQRGLQTTKEIIFQRSKTKAAKIKRYNQRISQFQQNRLFSNNEGRFYQQLNNDQGWEESEAPDPEEARTFWSDIWSKEGKHKKDAVWLKGFYEEVKEVVGQEEIHITENTIKKILRKFPNWKAPGPDGVQGFWLKKFRSMHTQLASSLRKCLEEGKTPLWMTKGRTVLIQKDKSKGTVASNYRPITCLPLAWKLLTGIFSDEIYRYLEGQELLPEEQKGCRRKSKGTGDLLYIDKMILKEVKQRRKNLSMAWVDYRKAYDMIPHSWLMECLAALKVNQNIRNLLSETMKSWRVELMCKDETLGEVRIKRGIFQGDALSPLLFVISMIPLTSMLRKAAHGYEFSSSKVKINHLLYMDDLKLYGKTQKDLESLIQTVRIYSSDIGMEFGLEKCASLVTKRGKIVESDGITLPDDKMIKNLKEYESYKYLGVQELDDIKTSEMKERVSKEYKRRVRKVLETKLNGNNIIKAINTWAVSVVRYSAPFLDWRKEEVQGLDRSTRKLMTMHKALHPKSNVDRLYISRNEGGRGLLSVEDTIETSKIGLERYVQENKEQLLSAARRSDMEVKETVKQYKDQRAKERKKNWKEKVLHGQFIRQTEEIAGEERWKWLKNSGIKRETETLILAAQEQAIRTNLIKAKIDKTQEDSRCRMCGKVDETINHLISECSKMAQKEYKNRHDWVGKRIHWDICRKFGVHVSEKWYNHKPESVIENDTCKVLWDFTIQTDHVIEARRPDLILIKKEDNNCIIVDFAIPYDTRIEQKEKEKVEKYQDLKRELQKIWNMKVKVVPIVIGALGTPPKDIKRRVEELGIETRIEEMQKIVILQFARILRKVLEN

SEQ ID NO: 32919 - protein, 1072 aa, Aurelia aurita
MECFFRSNPKVIGYRKRMHNLWKDMGMFQITEQRLLDQKAQIIKKKWLTDLELEEIKRLIEDAQCGITGTVISEERYEHAEREAEINVDEEDRNVNETIRTRDFVVDRDQNELDEKQKGILQQLNEIQERERKRLPALRGVERKRLSDAVNTVDEVLSKVKVTDITEVNDLIYCGAALVTEMLGIKTCRNDKKEPFWKRRLENQLKVLNKDLSRVNMLIERRKVKKRHEDLLQKRYNIKQRGLQTTKEIICQRIKAKAAKIKRYNQRISQFQQNRLFSNNEGRFYQQLNNDQGWEESEAPDPEEARTFWSDIWSKEGKHKKDAEWLQGFYEEVKGVGGQEEIHITENTVKKILRKFPNWKAPGPDGVQGFWLKKFKSMHTQLASSLTKCLEEGKTPLWMTKGRTVLIQKDKSKGTVASNYRPITCLPLAWKLLTGIFSDEIYRYLEGQELLPEEQKGCRRKSKGTGDLLYIDKMILKEVKQRRKNLSMAWVDYRKAYDMIPHSWLMECLAALKVNQNVRNLLSETMKSWRVEMMCKDEILGEVRIKRGIFQGDALSPLLFVISMIPLTSILRKAAPGYEFSSSKVKFNHLLYMDDLKLYAKTKKDLESLIQTVRIYSSDIGMEFGLEKCASLVMKRGKIVESDGITLPDDKTIKNLKEDESYKYLGVQELDDIKTSEMKERVSKEYKRRVRKVLETKLNGNNIIKAINTWAVSVVRYSAPFLDWRKEEIQELDRRTRKLMTMHKALHPKSNVDRLYISRNEGGRGLLSVEDTIETSKIGLERYVQESKERLLSAAKRSHMEVKETVKQYKDRRAKERKENWKEKVLHGQFIRQTEEIAGEERWKWLKNSGIKRETETLILAAQEQAIRTNLIKAKIDKTQEDSRCRMCGKVDETINHLISECSKMAQKEYKNRHDWVGRRIHWDICRKFGVHVSEKWYNHEPESVVENDTCKVLWDFTIQTDHVIEARRPDLILIKKEENNCIIVDFAIPYDTRIEQKEKEKVEKYQDLKRELQKLWNMKVKVVPIVIGALGTPPKDIKRRVEELGIETRIEEVQKTVILQTARILRKVLEN

SEQ ID NO: 32920 - protein, 893 aa, Morbakka virulenta
MEMLGIKTCRNDKKEPFWKRRLENQLKVLNKDLSRVNMLIARRKVKKKHEDLLQKRYNIKQRGLQTTKEIICQRSKTKAAKIKRYNQRISQFQQNRLFSNNEGRFYQQLNNDQGWEESEAPDPEEARTFWSDIWSKEGKHKKDAVWLKGFYEEVKEVVGQEEIHITENTIKKILRKFPNWKAPGPDGVQGFWLKKFRSMHTQLASSLRKCLEEGKTPLWMTKGRTVLIQKDKSKGTVASNYRPITCLPLAWKLLTGIFSDEIYRYLEGQELLPEEQKGCRRKSKGTGDLLYIDKMILKEVKQRRKNLSMAWVDYRKAYDMIPHSWLMECLAALKVNQNIRNLLSETMKSWRVELMCKDETLGEVRIKRGIFQGDALSPLLFVISMIPLTSMLRKAAHGYEFSSSKVKINHLLYMDDLKLYGKTQKDLESLIQTVRIYSSDIGMEFGLEKCASLVTKRGKIVESDGITLPDDKMIKNLKEYESYKYLGVQELDDIKTSEMKERVSKEYKRRVRKVLETKLNGNNIIKAINTWAVSVVRYSAPFLDWRKEEVQGLDRSTRKLMTMHKALHPKSNVDRLYISRNEGGRGLLSVEDTIETSKIGLERYVQENKEQLLSAARRSDMEVKETVKQYKDQRAKERKKNWKEKVLHGQFIRQTEEIAGEERWKWLKNSGIKRETETLILAAQEQAIRTNLIKAKIDKTQEDSRCRMCGKVDETINHLISECSKMAQKEYKNRHDWVGRRIHWDICRKFGVHVSEKWYNHKPESVIENDTCKVLWDFTIQTDHVIEARRPDLILIKKEDNNCIIVDFAIPYDTRIEQKEKEKVEKYQDLKRELQKIWNMKVKVVPIVIGALGTPLKDIKRRVEELGIETRIEEMQKIVILQSARILRKVFEN

SEQ ID NO: 32921 - protein, 1131 aa, Morbakka virulenta
MSVMLNIRLSNNGVNEGGATCEALSPGRCPTAQQRGSGRQPVSARRIRKKWSYEENRIVMECFFRSNPKVNGYRKRMHNIWKDMGMFQITEQHLLDQKAQITKKKWLTDLELEEIKRLIEDAECGITGNVISEERDEHAEREAEINADEGDRNVNETIRTRDFVVDRDQNEIDEKQKGILLQLNEIQGRERKRLPALRGVERKRLSDALNTVDEVLSKVKVTDITEVNDLIYCGAALVTEMLGIKTCRNNKKEPLWKRRLENQLKVLNKDLSRVNMLIERRKVKKKHEDLLQKRYNIKQRGLQTTKEIIFQRSKTKAAKIKRYNQRISQFQQNRLFSNNEGRFYQQLNNDQGWEESEAPDPEEARTFWSDIWSKEGKHKKDAVWLKGFYEEVKEVVGQEEIHITENTIKKILRKFPNWKAPGPDGVQGFWLKKFRSMHTQLASSLRKCLEEGKTPLWMTKGRTVLIQKDKSKGTVASNYRPITCLPLAWKLLTGIFSDEIYRYLEGQELLPEEQKGCRRKSKGTGDLLYIDKMILKEVKQRRKNLSMAWVDYRKAYDMIPHSWLMECLAALKVNQNIRNLLSETMKSWRVELMCKDETLGEVRIKRGIFQGDALSPLLFVISMIPLTSMLRKAAHGYEFSSSKVKINHLLYMDDLKLYGKTQKDLESLIQTVRIYSSDIGMEFGLEKCASLVTKRGKIVESDGITLPDDKMIKNLKEYESYKYLGVQELDDIKTSEMKERVSKEYKRRVRKVLETKLNGNNIIKAINTWAVSVVRYSAPFLDWRKEEVQGLDRSTRKLMTMHKALHPKSNVDRLYISRNEGGRGLLSVEDTIETSKIGLERYVQENKEQLLSAARRSDMEVKETVKQYKDQRAKERKKNWKEKVLHGQFIRQTEEIAGEERWKWLKNSGIKRETETLILAAQEQAIRTNLIKAKIDKTQEDSRCRMCGKVDETINHLISECSKMAQKEYKNRHDWVGRRIHWDICRKFGVHVSEKWYNHKPESVIENDTCKVLWDFTIQTDHVIEARRPDLILIKKEDNNCIIVDFAIPYDTRIEQKEKEKVEKYQDLKRELQKIWNMKVKVVPIVIGALGTPPKDIKRRVEELGIETRIEEMQKIVILQTARILRKVLEN

SEQ ID NO: 32922 - protein, 1131 aa, Morbakka virulenta
MSVMLNIRLSNNGVNEGGATCEALSPGRCPTAQQRGSGRQPVTARRIRKKWSYEENRIVMECFFRSNPKVNGYRKRMHNIWKDMGMFQITEQHLLDQKAQITKKKWLTDLELEEIKRLIEDAECGITGNVISEERDEHAEREAEINADEGDRNVNETIRTRDFVVDRDQNEIDEKQKGILLQLNEIQGRERKRLPALRGVERKRLSDALNTVDEVLSKVKVTDITEVNDLIYCGAALVTEMLGIKTCRNNKKEPLWKRRLENQLKVLNKDLSRVNMLIERRKVKKKHEDLLQKRYNIKQRGLQTTKEIIFQRSKTKAAKIKRYNQRISQFQQNRLFSNNEGRFYQQLNNDQGWEESEAPDPEEARTFWSDIWSKEGKHKKDAVWLKGFYEEVKEVVGQEEIHITENTIKKILRKFPNWKAPGPDGVQGFWLKKFRSMHTQLASSLRKCLEEGKTPLWMTKGRTVLIQKDKSKGTVASNYRPITCLPLAWKLLTGIFSDEIYRYLEGQELLPEEQKGCRRKSKGTGDLLYIDKMILKEVKQRRKNLSMAWVDYRKAYDMIPHSWLMECLAALKVNQNIRNLLSETMKSWRVELMCKDETLGEVRIKRGIFQGDALSPLLFVISMIPLTSMLRKAAHGYEFSSSKVKINHLLYMDDLKLYGKTQKDLESLIQTVRIYSSDIGMEFGLEKCASLVTKRGKIVESDGITLPDDKMIKNLKEYESYKYLGVQELDDIKTSEMKERVSKEYKRRVRKVLETKLNGNNIIKAINTWAVSVVRYSAPFLDWRKEEVQGLDRSTRKLMTMHKALHPKSNVDRLYISRNEGGRGLLSVEDTIETSKIGLERYVQENKEQLLSAARRSDMEVKETVKQYKDQRAKERKKNWKEKVLHGQFIRQTEEIAGEERWKWLKNSGIKRETETLILAAQEQAIRTNLIKAKIDKTQEDSRCRMCGKVDETINHLISECSKMAQKEYKNRHDWVGRRIHWDICRKFGVHVSEKWYNHKPESVIENDTCKVLWDFTIQTDHVIEARRPDLILIKKEDNNCIIVDFAIPYDTRIEQKEKEKVEKYQDLKRELQKIWNMKVKVVPIVIGALGTPPKDIKRRVEELGIETRIEEMQKIVTLQSARILRKVLEN

SEQ ID NO: 32923 - protein, 1131 aa, Morbakka virulenta
MSVMLNIRLSNNGVNEGGATCEALSPGRCPTAQQRGSGRQPVTARRIRKKWSYEENRIVMECFFRSNPKVNGYRKRMHNIWKDMGMFQITEQHLLDQKAQITKKKWLTDLELEEIKRLIEDAECGITGNVISEERDEHAEREAEINADEGDRNVNETIRTRDFVVDRDQNEIDEKQKGILLQLNEIQGRERKRLPALRGVERKRLSDALNTVDEVLSKVKVTDITEVNDLIYCGAALVTEMLGIKTCRNNKKEPLWKRRLENQLKVLNKDLSRVNMLIERRKVKKKHEDLLQKRYNIKQRGLQTTKEIIFQRSKTKAAKIKRYNQRISQFQQNRLFSNNEGRFYQQLNNDQGWEESEAPDPEEARTFWSDIWSKEGKHKKDAVWLKGFYEEVKEVVGQEEIHITENTIKKILRKFPNWKAPGPDGVQGFWLKKFRSMHTQLASSLRKCLEEGKTPLWMTKGRTVLIQKDKSKGTVASNYRPITCLPLAWKLLTGIFSDEIYRYLEGQELLPEEQKGCRRKSKGTGDLLYIDKMILKEVKQRRKNLSMAWVDYRKAYDMIPHSWLMECLAALKVNQNIRNLLSETMKSWRVELMCKDETLGEVRIKRGIFQGDALSPLLFVISMIPLTSMLRKAAHGYEFSSSKVKINHLLYMDDLKLYGKTQKDLESLIQTVRIYSSDIGMEFGLEKCASLVTKRGKIVESDGITLPDDKMIKNLKEYESYKYLGVQELDDIKTSEMKERVSKEYKRRVRKVLETKLNGNNIIKAINTWAVSVVRYSAPFLDWRKEEVQGLDRSTRKLMTMHKALHPKSNVDRLYISRNEGGRGLLSVEDTIETSKIGLERYVQENKEQLLSAARRSDMEVKETVKQYKDQRAKERKKNWKEKVLHGQFIRQTEEIAGEERWKWLKNSGIKRETETLILAAQEQAIRTNLIKAKIDKTQEDSRCRMCGKVDETINHLISECSKMAQKEYKNRHDWVGRRIHWDICRKFGVHVSEKWYNHKPESVIENDTCKVLWDFTIQTDHVIEARRPDLILIKKEDNNCIIVDFAIPYDTRIEQKEKEKVEKYQDLKRELQKIWNMKVKVVPIVIGALGTPPKDIKRRVEELGIETRIEEMQKIVILQSARILRKVLEN

SEQ ID NO: 32924 - protein, 1072 aa, Morbakka virulenta
MECFFRSNPKVSGYRKRMHNIWKDMGMFQITEQHLLDQKAQITKKKWLTDLELEEIKRLIEDAECGITGNVISEERDEHAEREAEINADEGDRNVNETIRTRDFVVDRDQNEIDEKQKGILLQLNEIQGRERKRLPALRGVERKRLSDALNTVDEVLSKVKVTDITEVNDLIYCGAALVTEMLGIKTCRNNKKEPLWKRRLENQLKVLNKDLSRVNMLIERRKVKKKHEDLLQKRYNIKQRGLQTTKEIIFQRSKTKAAKIKRYNQRISQFQQNRLFSNNEGRFYQQLNNDQGWEESEAPDPEEARTFWSDIWSKEGKHKKDAVWLKGFYEEVKEVVGQEEIHITENTIKKILRKFPNWKAPGPDGVQGFWLKKFRSMHTQLASSLRKCLEEGKTPLWMTKGRTVLIQKDKSKGTVASNYRPITCLPLAWKLLTGIFSDEIYRYLEGQELLPEEQKGCRRKSKGTGDLLYIDKMILKEVKQRRKNLSMAWVDYRKAYDMIPHSWLMECLAALKVNQNIRNLLSETMKSWRVELMCKDETLGEVRIKRGIFQGDALSPLLFVISMIPLTSMLRKAAHGYEFSSSKVKINHLLYMDDLKLYGKTQKDLESLIQTVRIYSSDIGMEFGLEKCASLVTKRGKIVESDGITLPDDKMIKNLKEYESYKYLGVQELDDIKTSEMKERVSKEYKRRVRKVLETKLNGNNIIKAINTWAVSVVRYSAPFLDWRKEEVQGLDRSTRKLMTMHKALHPKSNVDRLYISRNEGGRGLLSVEDTIETSKIGLERYVQENKEQLLSAARRSDMEVKETVKQYKDQRAKERKKNWKEKVLHGQFIRQTEEIAGEERWKWLKNSGIKRETETLILAAQEQAIRTNLIKAKIDKTQEDSRCRMCGKVDETINHLISECSKMAQKEYKNRHDWVGRRIHWDICRKFGVHVSEKWYNHKPESVIENDTCKVLWDFTIQTDHVIEGRRPDLILIKKEDNNCIIVDFAIPYDTRIEQKEEEKVEKYQDLKKEVQKIWNMKVKVVPIVIRALGTPPKDSKRRVEELGIETRIEEMQKIVILQSARILRKILEN

SEQ ID NO: 32925 - protein, 1131 aa, Morbakka virulenta
MSVMLNIRLSNNGVNEGGATCEALSPGRCPTAQQRGSGRQPVTARRIRKKWSYEENRIVMECFFRSNPKVNGYRKRMHNIWKDMGMFQITEQHLLDQKAQITKKKWLTDLELEEIKRLIEDAECGITGNVISEERDEHAEREAEINADEGDRNVNETIRTRDFVVDRDQNEIDEKQKGILLQLNEIQGRERKRLPALRGVERKRLSDALNTVDEVLSKVKVTDITEVNDLIYCGAALVTEMLGIKTCRNNKKEPLWKRRLENQLKVLNKDLSRVNMLIERRKVKKKHEDLLQKRYNIKQRGLQTTKEIIFQRSKTKAAKIKRYNQRISQFQQNRLFSNNEGRFYQQLNNDQGWEESEAPDPEEARTFWSDIWSKEGKHKKDAVWLKGFYEEVKEVVGQEEIHITENTIKKILRKFPNWKAPGPDGVQGFWLKKFRSMHTQLASSLRKCLEEGKTPLWMTKGRTVLIQKDKSKGTVASNYRPITCLPLAWKLLTGIFSDEIYRYLEGQELLPEEQKGCRRKSKGTGDLLYIDKMILKEVKQRRKNLSMAWVDYRKAYDMIPHSWLMECLAALKVNQNIRNLLSETMKSWRVELMCKDETLGEVRIKRGIFQGDALSPLLFVISMIPLTSMLRKAAHGYEFSSSKVKINHLLYMDDLKLYGKTQKDLESLIQTVRIYSSDIGMEFGLEKCASLVTKRGKIVESDGITLPDDKMIKNLKEYESYKYLGVQELDDIKTSEMKERVSKEYKRRVRKVLETKLNGNNIIKAINTWAVSVVRYSAPFLDWRKEEVQGLDRSTRKLMTMHKALHPKSNVDRLYISRNEGGRGLLSVEDTIETSKIGLERYVQENKEQLLSAARRSDMEVKETVKQYKDQRAKERKKNWKEKVLHGQFIRQTEEIAGEERWKWLKNSGIKRETETLILAAQEQAIRTNLIKAKIDKTQEDSRCRMCGKVDETINHLISECSKMAQKEYKNRHDWVGRRIHWDICRKFGVHVSEKWYNHKPESVIENDTCKVLWDFTIQTDHVIEARRPDLILIKKEDNNCIIVDFAIPYDTRIEQKEKEKLEKYQDLKRELQKIWNMKVKVVPIVIGALGTPPKDIKRRVEELGIETRIEEMQKIVILQSARILRKVLEN

SEQ ID NO: 32926 - protein, 882 aa, Chrysaora quinquecirrha
MDFSKTPTFQLLRGRPPPLAPPWLRYCAYREKESEKKHEDLLHKRYNIKQRGLQTTKEIICQRIKAKAAKIKRYNQRISQFQQNRLFSNNEGRFYQQLNNDQGWEESEAPDPEEAKTFWSDIWSKEGKHKKDAEWLKRFYEEVKEVGGQEEIHITENTVKKILRKFPNWKAPGPDGVQGFWLKKFKSMHTQLASSLTKCLEEGKTPLWMTKGRTVLIQKDKSKGIVASNYRPITCLPLAWKLLTGIFSDEIYRYLEGQELLPEEQKGCRRKSKGTGDLLYIDKMILKEVKRRRKNLSMAWVDYRKAYDMIPHSWLMECLAALKVNQNVRNLLSETMNSWRVEIMCKDEILGEVRIKRGIFQGDALSPLLFVVSMIPLTSILRKAAPGYEFSSKKVKINHLLYMDDLKLYGKTQKDLESLIETVKIYSSDIGMEFGLEKCASLVMKRGKIVESDGITLPDDKMIRNLKEDESYKYLGVQELDDIKTTEMKERVSKEYKRRVRKVLETKLNGNNFIKAINTWAVSVVRYSAPILDWRKEETQELDRRTRKLMTMHKALHPKSNVDRLYISRNEGGRGLISVEDTIETSKIGLERYVQESKERLLSAAKRSDMEVKDTVKQYKDRRAEERKENWKEKVLHGQFIRQTEEIAGEERWKWLKNSGIKRETETLILAAQEQAIRTNLIKAKIDKTQEDSRCRICGKVDETINHLISECSKMAQKEYKNRDDWVGRRIHWDICRKFWVHVSEKWYNHEPESVVENDTCKVLWDFTIQTDHVIEARRPDLILIKKEENNCIIVDFAIPYDTRIEQKEKEKVEKYQDLKRELQRLWNMKVKVVHIVIGALGTPPKDIKRRVVELGIETRIEEMQKTVILQSARILRKVLEN

SEQ ID NO: 32927 - protein, 947 aa, Chrysaora quinquecirrha
MKFKERTQETASIKGVERKRLSDAVNTVDEVLSIVKVTDITEVNDLIYCGAALVTEMLGIKTCRGVKKEPFWKRRLENQLKVLNKDLSRVNMLIERRKVKKKHEDLLHKRYNIKQRGLQTTKEIICQRIKAKAAKIKRYNQRISQFQQNRLFSNNEGRFYQQLNNDQGWEESEAPDPEEAKTFWSDIWSKEGKHKKDAEWLKRFYEEVKEVGGQEEIHITENTVKKILRKFPNWKAPGPDGVQGFWLKKFKSMHTQLASSLTKCLEEGKTPLWMTKGRTVLIQKDKSKGTVASNYRPITCLPLAWKLLTGIFSDEIYRYLEGQELLPEEQKGCRRKSKGTGDLLYIDKMILKEVKRRRKNLSMAWVDYRKAYDMIPHSWLMECLAALKVNQNVRNLLSETMNSWRVEIMCKDEILGEVRIKRGIFQGDALSPLLFVISMIPLTSILRKAAPGYEFSSNKVKINHLLYMDDLKLYGKTKKDLESLIETVRIYSSDIGMEFGLEKCASLVMKRGKIVESDGITLPDDKMIRNLKEDESYKYLGVQELDDIKTTEMKERVSKEYKRRVRKVLETKLNGNNIIKAINTWAVSVVRYSAPFLDWRKEETQELDRRTRKLMTMHKALHPKSNVDRLYISRNEGGRGLISVEDTIETSKIGLERYVQESKERLLSAAKRSDMEVKDTVKQYKDRRAKERKENWKEKVLHGQFIRQTEEIAGEERWKWLKNSGTKRETETLILAAQEQAIRTNLIKAKIDKTQEDSRCRICGKVDETINHLISECSKMAQKEYKNRHDWVGRRIHWDICRKFGVHVSEKWYNHEPESVVENDTCKVLWDFTIQTDHVIEARRPDLILIKKEENNCIIVDFAIPYDTRIEQKEKEKVEKYQDLKRELQRLWNMKVKVVPIVIGALGTPPKDIKRRVEELGIETRIEEMQKTVILQSARILRKVLEN

SEQ ID NO: 32928 - protein, 891 aa, Morbakka virulenta
MLGIKTCRNNKKEPLWKRRLENQLKVLNKDLSRVNMLIERRKVKKKHEDLLQKRYNIKQRGLQTTKEIIFQRSKTKAAKIKRYNQRISQFQQNRLFSNNEGRFYQQLNNDQGWEESEAPDPEEARTFWSDIWSKEGKHKKDAVWLKGFYEEVKEVVGQEEIHITENTIKKILRKFPNWKAPGPDGVQGFWLKKFRSMHTQLASSLRKCLEEGKTPLWMTKGRTVLIQKDKSKGTVASNYRPITCLPLAWKLLTGIFSDEIYRYLEGQELLPEEQKGCRRKSKGTGDLLYIDKMILKEVKQRRKNLSMAWVDYRKAYDMIPHSWLMECLAALKVNQNIRNLLSETMKSWRVELMCKDETLGEVRIKRGIFQGDALSPLLFVISMIPLTSMLRKAAHGYEFSSSKVKINHLLYMDDLKLYGKTQKDLESLIQTVRIYSSDIGMEFGLEKCASLVTKRGKIVESDGITLPDDKMIKNLKEYESYKYLGVQELDDIKTSEMKERVSKEYKRRVRKVLETKLNGNNIIKAINTWAVSVVRYSAPFLDWRKEEVQGLDRSTRKLMTMHKALHPKSNVDRLYISRNEGGRGLLSVEDTIETSKIGLERYVQENKEQLLSAARRSDMEVKETVKQYKDQRAKERKKNWKEKVLHGQFIRQTEEIAGEERWKWLKNSGIKRETETLILAAQEQAIRTNLIKAKIDKTQEDSRCRMCGKVDETINHLISECSKMAQKEYKNRHDWVGRRIHWDICRKFGVHVSEKWYNHKPESVIENDTCKVLWDFTIQTDHVIEARRPDLILIKKEDNNCIIVDFAIPYDTRIEQKEKEKVEKYQDLKRELQKIWNMKVKVVPIAIGALGTPPKDIKRRVEELGIETRIEEMQKIVILQSARILKKVLEN

SEQ ID NO: 32929 - protein, 1131 aa, Morbakka virulenta
MSVMLNIRLSNNGVNEGGATCEALSPGRCPTAQQRGSGRQPVTARRIRKKWSYEENRIVMECFFRSNPKVNGYRKRMHNIWKDMGMFQITEQHLLDQKAQITKKKWLTDLELEEIKRLIEDAECGITGNVISEERDEHAEREAEINADEGDRNVNETIRTRDFVVDRDQNEIDEKQKGILLQLNEIQGRERKRLPALRGVERKRLSDALNTVDEVLSKVKVTDITEVNDLIYCGAALVTEMLGIKTCRNNKKEPLWKRRLENQLKVLNKDLSRVNMLIERRKVKKKHEDLLQKRYNIKQRGLQTTKEIIFQRSKTKAAKIKRYNQRISQFQQNRLFSNNEGRFYQQLNNDQGWEESEAPDPEEARTFWSDIWSKEGKHKKDAVWLKGFYEEVKEVVGQEEIHITENTIKKILRKFPNWKAPGPDGVQGFWLKKFRSMHTQLASSLRKCLEEGKTPLWMTKGRTVLIQKDKSKGTVASNYRPITCLPLAWKLLTGIFSDEIYRYLEGQELLPEEQKGCRRKSKGTGDLLYIDKMILKEVKQRRKNLSMAWVDYRKAYDMIPHSWLMECLAALKVNQNIRNLLSETMKSWRVELMCKDETLGEVRIKRGIFQGDALSPLLFVISMIPLTSMLRKAAHGYEFSSSKVKINHLLYMDDLKLYGKTQKDLESLIQTVRIYSSDIGMEFGLEKCASLVTKRGKIVESDGITLPDDKMIKNLKEYESYKYLGVQELDDIKTSEMKERVSKEYKRRVRKVLETKLNGNNIIKAINTWAVSVVRYSAPFLDWRKEEVQGLDRSTRKLMTMHKALHPKSNVDRLYISRNEGGRGLLSVEDTIETSKIGLERYVQENKEQLLSAARRSDMEVKETVKQYKDQRAKERKKNWKEKVLHGQFIRQTEEIAGEERWKWLKNSGIKRETETLILAAQEQAIRTNLIKAKIDKTQEDSRCRMCGKVDETINHLISECSKMAQKEYKNRHDWVGRRIHWDICRKFGVHVSEKWYNHKPESVIENDTCKVLWDFTIQTDHVIEARRPDLILIKKEDNNCIIVDFAIPYDTRIEQKEKEKVEKYQDLKRELQKIWNMKVKVVPIVIGALRTPPKDIKRRVEELGSETRIEEMQKIVILQSARILRKVLEN

SEQ ID NO: 32930 - protein, 1072 aa, Morbakka virulenta
MECFFRSNPKVNGYRKRMHNIWKDMGMFQITEQHLLDQKAQITKKKWLTDLELEEIKRLIEDAECGITGNVISEERDEHAEREAEINADEGDRNVNETIRTRDFVVDRDQNEIDEKQKGILLQLNEIQGRERKRLPALRGVERKRLSDALNTVDEVLSKVKVTDITEVNDLIYCGAALVTEMLGIKTCRNNKKEPLWKRRLENQLKVLNKDLSRVNMLIERRKVKKKHEDLLQKRYNIKQRGLQTTKEIIFQRSKTKAAKIKRYNQRISQFQQNRLFSNNEGRFYQQLNNDQGWEESEAPDPEEARTFWSDIWSKEGKHKKDAVWLKGFYEEVKEVVGQEEIHITENTIKKILRKFPNWKAPGPDGVQGFWLKKFRSMHTQLASSLRKCLEEGKTPLWMTKGRTVLIQKDKSKGTVASNYRPITCLPLAWKLLTGIFSDEIYRYLEGQELLPEEQKGCRRKSKGTGDLLYIDKMILKEVKQRRKNLSMAWVDYRKAYDMIPHSWLMECLAALKVNQNIRNLLSETMKSWRVELMCKDETLGEVRIKRGIFQGDALSPLLFVISMIPLTSMLRKAAHGYEFSSSKVKINHLLYMDDLKLYGKTQKDLESLIQTVRIYSSDIGMEFGLEKCASLVTKRGKIVESDGITLPDDKMIKNLKEYESYKYLGVQELDDIKTSEMKERVSKEYKRRVRKVLETKLNGNNIIKAINTWAVSVVRYSAPFLDWRKEEVQGLDRSTRKLMTMHKALHPKSNVDRLYISRNEGGRGLLSVEDTIETSKIGLERYVQENKEQLLSAARRSDMEVKETVKQYKDQRAKERKKNWKEKVLHGQFIRQTEEIAGEERWKWLKNSGIKRETETLILAAQEQAIRTNLIKAKIDKTQEDSRCRMCGKVDETINHLISECSKMAQKEYKNRHDWVGRRIHWDICRKFGVHVSEKWYNHKPESVIENDTCKVLWDFTIQTDHVIEARRPDLILIKKEDNNCIIVDFAIPYDTRIEQKEKEKVEKYQDLKRELQKIWNMKVKVVPIVIGALGTPPKDIKRRVEELGIETRIEEMQKIVILQSARILRKVLEN

SEQ ID NO: 32931 - protein, 1408 aa, Trachythela sp.
MASQHSCTFTKCPDCSFIASSQGGLGVHRSKLHHIIIPDNVRSVNVERLYPEGKPFHCCLCNNIIGSFPNFVRHFKSKHCNITLNVTARCVICNRTFPTPKGAGVHCKRKHLIGKEDSYTLSPTPVMSTVNEDNEDNINSPTVSTRSRRSRLRNLSNMSLSCPLSNDTNDDNTFNEPTPSQTFTPISNILNPNASLFNPDTSFLEPFSLDHLQTSSPIQPSPNITPKPLSPVHQQNINNLNSSTPHSLTQVHLQTSRHIQPSSIITSQPLSPVHQQTITNPISLTPQPLTQAHIQPSNIKPSSITPTTYPQPVLIDLEDDPDLSINYPPRPLTPTYPTSPHIHNLTLPYLEPAVALIGCSTAEDSHDPSFPTNLEPAVALSGCSTAGESVFPSQPTNLEPVVDLSDCTAVDSTSSSFPPPNQSNPNSHNNPTIPSITPDDPFIVPPPINHNSHTTANSSDSDIPVNPNPDVDNLPEFVRIWSNRFNTDENFDDFSNRCDNFAKAVVDEGIKLTPNSKRRPKPINPNRPRVRPPHPNRRRLQPNPIEARRIQTLYRLSKKRAARLILQENQTSYTGSKENASEYFKNTFATREVDLNELHETLADLITPAPTDETLIQPFTKEEIINKLKFMSNSAPGKDKVEYRHLKLVDPKANILEIIFNRCLAERRVPSSWKESTTILIHKKGQSDDPTNFRPIALMSCLYKLYSSLLSARVSNYAIKHNLMSPNQKCARPGEGCHEHTFTLQTIISDCKRNNKNCFMAWLDLRNAFGSISHEAIYVTLAHMGFPDELIELIRDIYTNASTVVRTSRDEETDTIPVLSGVKQGCPISAILFNLTSELLIRSVLAKAKANPSAPYEMYDEKISVLAYADDLVLISKTKEGLQEFLDCISETANILSLSFRHDKCASLSLTLASSEVLRVSEIVFHVQDKAIPTLQHEDTYRYLGVPVGLLYDATHMEEITSKLIIDLEKIRDSSLAPWQKLDAIRTFIQPCLTYALRSCPVTRKSLKAYRSKLIEVLRSICNLPTRSSVNYFFSSKTAGGLAFQDPFDERHVQTIVHAVKILSSQDPFIQKISKGQLLSCVRRCFSREPTEEEVDAFLSGSCENELANHSKANNSQTLWSRARIACRKLKVKFTNSLTSPMISTNHTSSANTKGVAGYLHNYCKNIHEEKFKSRRDQGKVARCLSKDKNANGSNWLFTGTGMKFCDWRFIHRARTNTLPTNSVKSRWSNTNPACRRCQYQPDAETLPHILCHCRPNMTSIRRRHDKVVERITNAIYRGEVSLDKTVPGAPGQDRPDIVVKDGNRVLIIDVCCPFDNDEEALETANKRKLDKYNYLINHFATQNMSAKVFGFVIGSLGSWFPGNEDVLNELKISKRYRGLFRKLCCSDVIHGSRNIYIEHLTGEAQLE

SEQ ID NO: 32932 - protein, 1016 aa, Solenopsis invicta
MELNNPGPSGSRGPTTRTRKASSESSSDPEQVYACEHPDCDRIFDTATGRGVHYRRAHPDWYDARQNVVAIKTRWSEEEVRLLARREAELSRLGERFLNQALLRDFQDRSLESIKGRRRQPSYKKMVQDFLDEIDGDVLAAGSSAVDDVEVEPEAGVGQDKYTKAIADFLASQPGLADASFQAARLQNICDSLSSNTISEVSDKLTLYLKEIFPTKPRKRPGTDKETTGLNSRRQLRRAEYARTQDLWKKNRGRCIRSLLEDVTNVQIPSQDVMVPFWETIMTSRSDTSPGIDFKRPIQEELWAPITAFEIVKALPANTTAAGPDGVSARFLRKVPIGVLVRILNVIQWCGRAPSHLLASTTTLIPKKSNAHLPSDFRPITVSSVIVRTLHKVLATRMVNKIKLDQRQRAFRSTDGCADNIFLLDLVLKYHHKHHKPLFMASLDVAKAFDSVSHTTIRETLEEMGLPVNMIRYVMDVYERSTTVLCCDKWTSGRIKPSCGVKQGDPMSPIIFNMVMDRMIKKLPEDIGAKIGNLKINAAAFADDLMLFASTPLGLQRLLDTTTTYLGKCGLQVNANKCLTVALRNVPREKKTVVDKTTVFMCNNQVLPSLKRSDEWMYLGVPFTPEGRLKIDVTKRLSSQIEKITKAPLKPQQRLFILRTYILPSHYHKLELSNVNVSTLRKTDRMVRNAAKQWLNLPTDAPNAYFHACIKDGGLGIPSLRWLAPLNRLHRINKLPLSEKHVEDAPGTFLQLEEERCRERLKDGGAVYDTRNSINTRWAQLLYAKVDGRGLQESSKVPQQHAWVGEGTRFLSGRDYIQSCKMRINALPTKSRTARGRPKDRSCRAGCSSAETLNHVLQKCHRTHAARIRRHEVLVSYVARAFDRKEYQVSLEPRIQSAQGLRKPDIVAKLGVTALVVDAQVINDQFDLDTAHRNKVTYYKNIENEIKATFQVDTVVFSSVTLSWRGVWSVSSAGDLIKLGILRKSDLKVISSRTIVGGLSCFHLFNKSTEVKRGRA

SEQ ID NO: 32933 - protein, 1044 aa, Solenopsis fugax
MAECCCGEPRSLGLPALLTLLVGPINKKPPRMDIHSPGPSGSRGPTTRSRIASGSTPPDPDQYPCEFPGCERVFTSATGRGVHHRRMHPDWFDARQNVVAVKARWSEEEVRILAKREAELTKLGTVFMNQALHGEFQDRTLESIKSRRRQPNYRRLVQEFLEEMDEPSPDEVAEDAPDVVQVDHKAMVVEYLASLPKISTGDFNPARLQRICDSLSNKNPSSILDELTLYLREIFPPKVRGRREEADAGQNANLARSRRQKRRAEYARTQDLWRKNRNKCIRMLLDDITDVQVPAKDVMVPFWEEVMKGHADTTPGGEAKRPVQDELWAPVTGDEVKRALPANTTSAGPDGLSARLLKRVPCGILVRILNIVVWCGKAPTHLLASATTLIPKKSNASLPSDFRPITVSSVLIRTLHKILANRMMSSVELDQRQRAFRPTDGCSDNVFLLDLILKYHHKKHKPLFMASLDIAKAFDSVSHATIRETLEIMGLPGPMTQYIMDTYTRSTTVLCCNKWTSGQVKPTCGVKQGDPMSPIIFNLIVDRMLKRLPEDVGARVDELVVNAAAFADDVLLFASTPVGLQKLLDISTQFFAACGLQVNAAKSLTVTLRTVPHEKKTVVDRSTVFTCNNRVLPTLKRTDEWKYLGILFTAEGRLKVDITGELASHLEKITKAPLKPQQRLFIVRTYILPGLYHKLGLSSINVSTLRKLDRSVRTSVKGWLNLPSDTPNAYFHANIKDGGLGVPSMRWNGPLMRLHRLKKLPMANEPAVNTPGAFLRQELGKCTDRLYGEDRAMTSQADIDKRWAQLLYAKVDGAGLKESARVPQQHMWVGEGTRFLSGRDYLQSCKLRINALPTKSRVARGRPKDRHCRAGCNAAETLNHVLQRCHRTHVARVRRHNAIVTYMAKAFQNKDFQVQVEPKIQTHVGLRKPDIVACRGVTAIVADAQVVNDQIDLDEAHAIKSSYYRNIEDDIRQRCKVETVVFTSITTSWRGVWSGGSAEDLVKLGILRKSQLKIVSSRAIIGGLACFHLFNKSTEVAGRRTGIG

SEQ ID NO: 32934 - protein, 1227 aa, Novumbra hubbsi
MDSKPCHSQWDQPGLSKLTPTVGVSGHREVVRSGPSSTLLPGGLGMYNYGSECEWDVAGTASKRRRSLDGEDERNKELTERKRTRAVVAQEPVCVDEVRSRSPPPRGGDLGALPAHSVLAGASRTEASRPEGIDPPETPSTLVIPVPVGDLSCELCGWIMGAVGAVANHFATRHPAVPLVYQCRRCERQSPYHHPISCHVPKCRPDRVAQAGGGFVCGLCGKAFARAVGLSQHVRHKHPALYCQRTREARTAGRPSDGAREGGDVREASVRQTRSASRALGRTVSLSDSPEALDENRLVQWLSIPGDPPTPQVGVREVLRELLTGDGTEGGVELGEITLTLRGAERDPSLLNAAASAMIRLVREAEGADRLPLRCTRRRVPQREENGNTSDGAAYRKVQEMFKHHRSGLAEFLFDGKESGKASRPSPEIALAFKGKWEEADAFVGLGQFRADGGADVSVFLSLISAAEVCDNLGAIKKDTAAGPDGVSRTALLAWDKSGSKLSQVFSIWLALGLVPEIFKRCRTTLIPKSSDPAVGVHMSGWRPLTIGSVVMRLYSRILNRRLATACPISPRQRGFISAAGCSENLMVLDGIISDARRRGLGLGVVFIDFARAFDSVSHSHILEVLRGRGLDDHVVGLIRDSYTAVTTKVAVVGGESPIINMRVGVKQGDPMSPLLFNLAIDPMIATLERYGSGYPLGGGRGVVSLAFADDLVLLSGSWGGMSQNLSILEAFCRRTGMRVQPKKCHGFFTQKVTGQFVVNDCARWSLGGEQLRMVAAEETVKYLGLEVGPWSGIARPDLVGRLRGWVRSLGGASLKPSQKVDLLKGYAVPRLMYLADHGGLGQVVLRVMDGIVKQAVKRWLHLPMCTCDGLLYSRPKDGGLGLGKLACQVPSIQVRRIHRLWHSEDSVTREVTRRVVRPSDVAGLWLWAGGSEEGVPVLSGTGPPEGSDLAGAVEGVVEPGQGAFQSLVAPDWRRAEFQRWMGLDVQGRGVLVFRGDKNSNHWLADPVSVGFSQRSYIASLQLRASVYPTRESLSRGRSTDTVACRHCEGATESCSHILGQCPMVKGSRIMRHHKLCNLLAEEAESAGWIVAREMVCSTPAGALRRPDLVLVKDGSALVVDVTVRYEAAFDTLRIAAAEKVARYKPVRGSVMRALNASSATVFGFPLGARGKWHEGNDKLLEVLGFGPARRRSLAKLFSRRALLYSLDVLRDFMRGGSGSALGGPGE

SEQ ID NO: 32935 - protein, 1229 aa, Novumbra hubbsi
MDSKPCHSQWDQPGLSKLTPTVGVSGHREVVRSGPSSTLLPGGLGMYNYGSECEWDVAGTASKRRRSLDGEDERNKELTERKRACVAEAQEPMCVDEVRPGSSHLRVGDLGALPAHSVPAEVSRTESSRPGGTVPPETPDTVVIPVPVVDLCCRLCGGRTGTVGTVAKHFATRHPAVPLLFQCSMCGKTNPNHHSISCHVPKCRPSVAVPGGTGFVCSLCPKGFAKQVGLSQHVRHKHPGLYCRMTGGTRTKDQSVVGAHLGTEVRETPGRQTRSASRARGHVVSLSDSPEALSETRLVQWLSISGDPPTPQEGVRETLRELLTGNGTEGGVRIGGVTLSLRGVEQDPTLLDTVASAMISLVREAEGMDCRLLRCAVRQVPRKEENGSSSGGAMYHKVQGMYTHHRSRLAELLFDGQESGKASRPSPEIASAFKEKWEEADAFVGLGQFRSDGGSDSSVFLSLISAAEVCDNLRAIKKDTAAGPDGISRTALLAWDKSGSKLSQVFSVWMALGRVPGIFKACRTTLIPKSSDPAVGVHMSGWRPLTIGSVVMRLYSRILNRRLASACPISPRQRGFISAAGCSENLMVLDGIISDARRRGLGLGVVFIDFARAFDSVSHSHILEVLRGRGLDGHVVELVRDSYTAVTTKVAVVGGDSPIINMRVGVKQGDPMSPLLFNLAIDPVIATLERYGSGYPLGGGRGVVSLAFADDLVLLSGSWGGMSRNLSILEAFCHRTGMRVQPKKCHGFFTQKVSGQFVVNDCARWSLGGEQLRMVAADETVKYLGLEMGPWSGIARPDLVGRLRGWVRSLSGASLKPSQKVEMLKGYAMPRLLYLADHGGLGQVVLRVLDGIVKQAVKRWLHLPMCTCDGLLYSRPKDGGLGLGKLACQVPSIQVRRIHRLWHSEDSVTREVTRRVVRPSDVAGLWLWAGGSEEGVPVLSGTGPPEGSDLAGAVEGVEGPGQGAFQSLVAPDWRRAEFQRWMGLDVQGRGVLVFRGDKNSNHWLADPVSVGFSQRSYIASLQLRANVYPTRESLSRGRSTDTVACRHCEGATESCSHILGQCPMVKGSRIMRHHKLCNLLAEEAESAGWIVAREMVCSTPAGALRRPDLVFVKDRSALVVDVTVRYEAAFDTLRIAAAEKVARYKPVRGSVMRALNASSATVFGFPLGARGKWHEGNDKLLEVLGFGPARRRSLARLFSRRALLYSLDVLRDFMRGGSGSALGGPGEWC

SEQ ID NO: 32936 - protein, 1095 aa, Pissodes strobi
MKWTRELNSDIMRAFYYVNQCQDEPLPAWRHSLYTEFTRRHPDLNLSEQNIVDRKRVIINKQYLTHTELQNLKREVGSMLHQQQTYGQADDNEVNQVERDNNPPGSQEPNEAVASSIDPVIAEKFQSKLGFYESVDPFNRPIIPVLTNIRKATSTITKDNKILESYLTSNRTLAEIHFALYSAAVTVIELNGQNTFDPKNKSHNRAINSPVWKKRLENSVNELRGKADLLSEYLRGNPSRKVYFKTKEIAIKAGIHQNQHNYAEQLRELQDRLRQKAKAKGARLARYNETSKRKQQNGAFFRNRRKFFSSLENQRQSEQSDHEIDNYTFKTFWSSIWARSTGFNEEAEWINTVEEQTSNVPEMSVEVFTQADVAAAVNKTQNWKAPGPDRLQNFWLKHFPAAHKSLTRCFTEVLENPLDFPEFLSKGNTFLLYKKGDQGEPRNYRPITCLSVVYKIFTSVVTEKIYQHCTANNILEEEQKGCTRAALGCKQQLTIDAVVLKQAQTHKRNLNVCYIDYSKAFDSVPHDWLMKGLEIYKICPRVRKLLQHLMGKWSTNIHVYNKNIGAVQIKKGIFQGDSLSPLWFCLALNPMSKLLNDTRAGYKISERDHHSLTHLLYMDDLKLYAGTPYKLKSLIKTVETFSKDKCSTVNIKKGKIEIRQEVVCNITELPPEETYRYLGIPQNQTIDHRAIKEEFKKKYTGRLKKLLNSKLTSRNLIEAVNSWAVPVLAYSFGIIKWSSTDLDDLDRLTRRQLGKFRNMHTNSSVDRLYLPRREGGRGLINIKNLCLRLENDMRQRFRTSNGVIMRSIVAKDDRYTVLNLSQRDRLLEIRTNEDRINNWSEGAMHGRYPKLLKMEGVDKQSSLRWLEEGQLFPETEGFMIAIQDRVNRTKNYEKNVLKQDVVDKCRKCFAVGETIEHIMAGCPVLADNAYLGRHNQLAKIIHQQLAIKHKLLDETTPPYYKYTPSPVLESAEAVLYWDRPITTDRTIDFNRPDIIIINKAGKTAVIIDISVSLSHNISRVIREKTTKYENLSFELKHLWKLRKVTILPFVISVEGIVFNDFLRNLTELELPHSICKVGQRAVLLQTCHIVRKFLN

SEQ ID NO: 32937 - protein, 996 aa, Nymphon striatum
MFSLVFDLHTAMAPADRPLGEDENLIPCWKCNVGDSNSRRRQWIACSVCKAWFHITCVKVTKRLIEAIGNWTGPCCAAPSQTPRPTNFQTPENCEPDILNFSRKGSVLKRVPKASRIQAAKLLTDLINKVLVDNSTNAWENVFRFARGCFSNPNRGGRNSKSLATVVNHQIRNFMVYIGDDKHPQNSVEKSNKKSNPTLAKLVSSKIATGDVRGAVRIVSSESSIVKASAEVCQKLREMHPEPHIDTAFPLSPTDQEKSNSIILTVGNVRAAILSFKNGSAGGPDGLLPQHLKDLTAEALGEISSSLLEVLTKLLNCIVLSGDIPENVCPTFYGASLMALSKKDGGLRPIAIGNTLRRLVGKACMAKLSATCSRTFRPHQLGVGTRLGAEAAVHSCRRFLCHIPSSEKVLLKIDFKNAFNSVRRDLILKEAKNHAPEVYPLVYQCYSHKSHLFFDNYTLSSMEGVQQGDPLGPFLFSLAIMELIRSCESELNMWYLDDGTIGGEAESVLSDFKKIIAAASDLGLQINPAKCELVIFNPIKKVHTDISEKFKEITPQIKLIKAEDLTLLGAPILPTATETVLNSKLEELTLMSERLSELDSHDALYLLKHCFAIPKLMYFLRSSPCFDSEILKVYDQKLRSSLEKVLNTHLSETTWTQCSLPVAQGGLGVRSAVDLALPAFLSSAHACNILLEALLPQIVFSDLYQEISVAESKWLEKMGPLNVTPLLPAVQASWDAPLCKLKCIGLLSTATSEKDKARLLASTSKHSSDWLNAIPIPSLGLKMDNSQLRIACSLRLGSPMCIPHECKCGTMVDNSGTHGLSCKKSAGRHARHSAVNDILKRALSSANFPSVLEPTGVVRSDGKRPDGMSIFPWRNGKILVWDFTCSDTVAPSHLAVASCSAGKVAENAENAKLAKYSGLSGSYEFVPVCVETLGPWGPNGLKLIQEIGNLIKIETNEPRATTFLKQSVSMAIQRGNAASVIGTVVACRNLDEIFYL

SEQ ID NO: 32938 - protein, 822 aa, Nymphon striatum
MVYIGDGEHPQNSEEKSNKRSNPTLAKLVSSKIATGDVRRAVRIVSSESSIVKASAEVCQKLREMHPEPHINTAFPLSPTGQEKSNCIILTVGNVRAAILSFKNGSAGGPYGLLPQHLKDITSEALGEISSCLLEVLTKLLNCIVLSGDIPDNVCPTFYGASLMALSKKDGGLRPIAIGNTLRRLVGKACMAKLSATCSRTFRPHQLGVGTQLGAEAAVHSCRIFLCHIPSSEKVLLKIDFKNAFNSVRRDLILKEAKNHAPEVYPLVYQCYSHKSHLFFENFTLSSMEGVQQGDPLGPFLFSLAIMELIRSCESELNMWYLDDGTIGGEAESVSSDFKKIIAAASDLGLQINPAKCELVIFNPIKKVHTDISEKFKEITPQIKLIKAKDLTLLGAPILPTATETVLNSKLEELTLMSERLSELDSHDALYLLKHCFAIPKLMYFLRSSPCFDSEILKVYDQKLRSSLEKVLNTHLSEATWTQCSLPVAQGGLGVRSAVDLALPAFLSSAHACNILLEALLPQIVFSDLYQELSVAESKWLEKMGPLNVTPLLPTVQASWDAPLCKLKYIGLLSTATSEKDKARLLASTSKHSSDWLNAIPIPSLGLKMDNSQLRIACSLRLSSPMCIPHECKCGTMVDDSGTHGLSCKKSAGRHARHSAVNDILKRALSSANFPSVLEPTGVVRSDGKRPHGISIFPWRNSKILVWDFTCSDTVAPSHLAVASCSAGKVAENAENAKIAKYSGLSGSYEFVPVCVETLGPWGPNGLKLIQDIGNLIKIETNEPRATTFLKQSVSMATQRGNAASVIGTVVACRNLDEIFYL

SEQ ID NO: 32939 - protein, 996 aa, Nymphon striatum
MFSLVFDLHTAMAPADRPLGEDENLIPCRKCNVGDSNSRRRQWIACSVCKAWFHITCVKVTKRLIEAIGNWTGPCCAAPSQTPRPTNFQTPENCEPDILNFSRKGSVLKRVPKASRIQAAKLLTDLINKVLVDNSTNAWENVFRFARGCFSNPNRGGRNSKSLATVVNHQIRNFMVYIGEDKHPQNSVEKSNKKSNPTLAKLVSSKIATGDVRGAVRIVSSESSIVKASAEVCQKLREMHPKPHIDTAFPLSPTDQEKSNCIILTVGNVRAAILSFKNGSAGGPDGLLPQHLKDLTAEALGEISSSLLEVLTKLLNCIVLSGDIPENVCPTFYGASLMALSKKDGGLRPIAIGNTLRRLVGKACMAKLSATCSRTFRPHQLGVGTRLGAEAAVHSCRRFLCHIPSSEKVLLKIDFKNAFNSVRRDLILKEAKNHAPEVYPLVYQCYSHKSHLFFDNYTLSSMEGVQQGDPLGPFLFSLAIMELIRSCESELNMWYLDDGTIGGEAESVLSDFKKIIAAASDLGLHINPAKCELVIFNPIKKVHTDISEKFKEITPQIKLIKAEDLTLLGAPILPTATETVLNSKLEELTLMSERLSELDSHDALYLLKHCFAIPKLMYFLRSSPCFDSEILKVYDQKLRSSLEKVLNTHLSETTWTQCSLPVAQGGLGVRSAVDLALPAFLSSAHACNILLEALLPQIVFSDLYQEISVAESRWLEKMGPLNVTPLLPAVQASWDAPLCKLKCIGLLSTATSEKDKARLLASTSKHSSDWLNAIPIPSLGLKMDNSQLRIACSLRLGSPMCIPHECKCGTMVDNSGTHGLSCKKSAGRHARHSAVNDILKRALSSANFPSVLEPTGVVRSDGKRPDGMSIFPWRNGKILVWDFTCSDTVAPSHLAVASCSAGKVAENAENAKIAKYSGLSGSYEFVPVCVETLGPWGPNGLKLIQEIGNLIKIETNEPRATTFLKQSVSMAIQRGNAASVIGTVVACRNLDEIFYL

SEQ ID NO: 32940 - protein, 996 aa, Nymphon striatum
MFSLVFDLHTAMAPADRPLGEDENLIPCRKCNVGDSNSRRRQWIACSVCKAWFHITCVKVTKRLIEAIGNWTGPCCAAPSQTPRPTNFQTPENCEPDILNFSRKGSVLKRVPKASRIQAAKLLTDLINKVLVDNSTNAWENVFRFARGCFSNPNRGGRNSKSLATVVNHQIRNFMVYIGDDKHPQNSVEKSNKKSNPTLAKLVSSKIATGDVRGAVRIVSSESSIVKASAEVCQKLREMHPEPHIDTAFPLSPTDQEKSNSIILTVGNVRAAILSFKNGSAGGPDGLLPQHLKDLTAEALGEISSSLLEVLTKLLNCIVLSGDIPENVCPTFYGASLMALSKKDGGLRPIAIGNTLRRLVGKACMAKLSATCSRTFRPHQLGVGTRLGAEAAVHSCRRFLCHIPSSEKVLLKIDFKNAFNSVRRDLILKEAKNHAPEVYPLVYQCYSHKSHLFFDNYTLSSMEGVQQGDPLGPFLFSLAIMELIRSCESELNMWYLDDGTIGGEAESVLSDFKKIIAAASDLGLQINPAKCELVIFNPIKKVHTDISEKFKEITPQIKLIKAEDLTLLGAPILPTATETVLNSKLEELTLMSERLSELDSHDALYLLKHCFAIPKLMYFLRSSPCFDSEILKVYDQKLRSSLEKVLNTHLSETTWTQCSLPVAQGGLGVRSAVDLALPAFLSSAHACNILLEALLPQIVFSDLYQEISVAESKWLEKMGPLNVTPLLPAVQASWDAPLCKLKCIGLLSTATSEKDKARLLASTSKHSSDWLNAIPIPSLGLKMDNSQLRIACSLRLGSPMCIPHECKCGTMVDNSGTHGLSCKKSAGRHARHSAVNDILKRALSSANFPSVLEPTGVVRSDGKRPDGMSIFPWRNGKILVWDFTCSDTVAPSHLAVASCSAGKVAENAENAKLAKYSGLSGSYEFVPVCVETLGPWGSNGLKLIQEIGNLIKIETNEPRATTFLKQSVSMAIQRGNAASVIGTVVACRNLDEIFYL

SEQ ID NO: 32941 - protein, 996 aa, Nymphon striatum
MFSLVFDLHTAMAPADRPLGEDENLIPCWKCNVGDSNSRRRQWIACSVCKAWFHITCVKVTKRLIEAIGNWTGPCCAAPSQTPRPTNFQTPENCEPDILNFSRKGSVLKRVPKASRIQAAKLLTDLINKVLVDNSTNAWENVFRFARGCFSNPNRGGRNSKSLATVVNHQIRNFMVYIGDDKHPQNSVEKSNKKSNPTLAKLVSSKIATGDVRGAVRIVSSESSIVKASAEVCQKLREMHPEPHIDTAFPLSPTDQEKSNSIILTVGNVRAAILSFKNGSAGGPDGLLPQHLKDLTAEALGEISSSLLEVLTKLLNCIVLSGDIPENVCPTFYGASLMALSKKDGGLRPIAIGNTLRRLVGKACMAKLSATCSRTFRPHQLGVGTRLGAEAAVHSCRRFLCHIPSSEKVLLKIDFKNAFNSVRRDLILKEAKNHAPEVYPLVYQCYSHKSHLFFDNYTLSSMEGVQQGDPLGPFLFSLAIMELIRSCESELNMWYLDDGTIGGEAESVLSDFKKIIAAASDLGLQINPAKCELVIFNPIKKVHTDISEKFKEITPQIKLIKAEDLTLLGAPILPTATETVLNSKLEELTLMSERLSELDSHDALYLLKHCFAIPKLMYFLRSSPCFDSEILKVYDQKLRSSLEKVLNTHLSETTWTQCSLPIAQGGLGVRSAVDLALPAFLSSAHACNILLEALLPQIVFSDLYQEISVAESKWLEKMGPLNVTPLLPAVQASWDAPLCKLKCIGLLSTATSEKDKARLLASTSKHSSDWLNAIPIPSLGLKMDNSQLRIACSLRLGSPMCIPHECKCGTMVDNSGTHGLSCKKSAGRHARHSAVNDILKRALSSANFPSVLEPTGVVRSDGKRPDGMSIFPWRNGKILVWDFTCSDTVAPSHLAVASCSAGKVAENAENAKLAKYSGLSGSYEFVPVCVETLGPWGPNGLKLIQEIGNLIKIETNEPRATTFLKQSVSMAIQRGNAASVIGTVVACRNLDEIFYL

SEQ ID NO: 32942 - protein, 795 aa, Pyrgus malvae
MQHSDHNDQADWIRDEENRWSQIEEMEFTDVSGEEIEVIISKTKNWKATGIDSVHNFWYKKFYVLHNTLARIITELLRGTTELPRFVTKGVTYMLPKSNETNNPSQYRPITCLPTIYKIITSCITHKINIHLSQHNIIAEEQKGCRRYHKGCKEQLIIDSTVLKHAQNHKRNLHIAYIDYRKAFDSVPHSWLIRILQIYKISPTIVTFLKNTIHEWKTSLVLSNSEQAINTDEISIKNGIFQGDSFSPLWFCLALNPLSHLLNTTKNGYSLSKETEISHLMYMDDIKLFSKSDKALSTLILKTTQFSKDINMSFGLDKCRTLHLRKGKIYSNINNYTEEINFTRMESTDTYKYLGILQSNNINHTQIKNKLKGEYSRRLNLICKKSLLSKNLFKAINTFAVPVLTYTFGIIKWSRTDIYHLEILTRTILTKYNNLHPKSAIERISLKRPIGGRGLVDLKILWEKQIYNLRNFFYDKSKTSNIHFEIINLDKNFTPLNLKTKNIDNNISTSKSSEKDKLDSWRRKELHGRHLHDLEQPHIDIDASNRWLKLGSLFPETEGFMIAIQDQVINTKNYRKHIIKDPNLQNDSCRKCHRHPETIQHITSACPTLTQTDYTHRHNQITHIIHQKMAIIHNLLPNKTLPYYQYKPKPVLESTRYKLYYDRAILTDKTIHNNRPDITLIDKQDRMVFLVDIAVPNTHNLHRTITEKINKYTELKEEIQRIWKMNKVYIVPLVLSSTGVVPKHLLQSLKILNINESIYITMQKAAILNTCRLVRKFLQEDLNTQPVTLHETHLA

SEQ ID NO: 32943 - protein, 1000 aa, Pyrgus malvae
MDPASRPKLPKLKDSRKLYQLVDAFNKEILSRFHSIDTDILQLHTLVYCSALVISENLGFKIRKKEQINKTFNKKQVTPPWQIRIEKDIKQLRADIGRVTQYINSNRSKKVIKHVERIFKATKIHSTHEKNNIRPEEYLDILKQKLALKSQRLARYKKSLQRKTDNKLFSSNEKAFYRSLCNTTIKKDFDLPNPDDLKNYWTNIWKQHSDHNDQADWIRDEENRWSQIEEMEFTDVSGEEIEVIISKTKNWKAAGIDSVHNFWYKKFYVLHNTLARIITELLRGTTELPRFVTKGVTYMLPKSNETNNPSQYRPITCLPTIYKIITSCITHIINIHLSQHNIIAEEKKGCRRYHKGCKEQLIIDSTVLKHAQNHKRNLHIAYIDYRKAFDSVPHSWLIRILQIYKISPTIVTFLKNTIHEWKTSLVLSNSEQAINTDEISIKNGIFQGDSFSPLWFCLALNPLSHLLNTTNNGYSLSKETDISHLMYMDDIKLFSKSDKALSTLILKTTQFSKDINMSFGLDKCRTLHLRKGKIDSNSNNYTEEINFTRMESTDTYKYLGILQSNNINHTQIKNKLKGEYSRRLNLICKKSLLSKNLFKAINTFAVPVLTYTFGIIKWSRTDIYHLEILTRTILTKYNNLHPKSAIERISLKRPIGGRGLVDLKILWEKQIYNLRNFFYDKSKTSNIHFEIINLDKNFTPLNLKTKNIDNNISTSKSSEKDKLDSWRRKELHGRHLHDLEQPHIDIDASNRWLKLGSLFPETEGFMIAIQDQVINTKNYRKHIIKDPNLQNDSCRKCHRHPETIQHITSACPTLTQTDYTHRHNQITHIIHQKMAIIHNLLPNKTLPYYQYKPKPVLESTRYKLYYDRAILTDKTIHNNRPDITLIDKQDRIVFLVDIAVPNTHNLHRTITEKINKYTELKEEIQRIWKMNKVYIVPLVLSSTGVVPKHLLQSLKILNINESIYITMQKAAILNTCRLVRKFLQEDLNTQPVTLHETHLA

SEQ ID NO: 32944 - protein, 1277 aa, Ennomos quercinarius
METRQRKLRIGPLPEGDRRGTSVAGRGRDSMLASGSRTDGCTGVGDGGVREKSSRITAEQSESSSRADTPTEDVSQETCVNQPVTTKAGKPRVRMKWDDDINVFIMRTYYLVTKLETDKTMYCKKLFDQFKIKYPQLNVTAQRIADQRRVIIRNKLLPDHIIGNLKKEIAEQLREEELHSTIESRHDEHPPITIDTFTSQPSYPSTRAYSAQITPSGTQTTNETILTQSTDASTQTLIIPNVHNSETQNFQPITALANTTIQNLVHQLEATLTLYTGTDPTSRPKLPKLKENKKLYQYIDIFNKEILGRFYSIDSDVNDIHTLVYCSAFVICDNLGYKIKTEHADNRNNKNIPEKPAWQIRIENDIKALRADIGRVTQYIKNNRSKKLVKKVEKIFNSTKVHSSHERDNIRPEEYLDTLKQKLALKTQRLARYKKALQRKEDNKLFSTNEKGFYRSLRNEVTTKNSELPNPEELKNYWADLWKKQNDHNDRADWIREEEKRWEHIEEMEFTDISGEDIELVTKKTKNWKAAGIDGIHNFWYKKFFILHDTLARIVTDLLKGIDELPKFITKGITYMLPKSNDTANPSQYRPITCLPTIYKIITSCITTKINYHLSQNNILAEEQKGCRQYHKGCKEQLIIDSTILKHAQTHNRNIHISYIDYKKAFDSVPHSWLIRILQIYKINPTIITFLENAMNDWKTRLFLTNSSQSISSDEILIENGIFQGDSLSPLWFCLALNPLSNLLNKALSGYKLTTHTEISHLMYMDDIKLFSKSEKALKALLQKTTQFSDDINMSFGLDKCKTLHIRKGKIIGTNDDDEDSVENNFARMENDDTYKYLGIHQSKTVNHTAIKNKLTQEYTRRLNLICKRPLTSKNLFKAINTYAVPILTYSFGVIKWSRTDINNLEIKTRTTLTKHNYSHPKSAIERMTVKRLKGGRGLIDLKNLWEGQVQNLQKFFHNKSETSKIHLATIETDQNYTPLNLKSINTCTTSQEDPETEKINSWRRKELHGRHLHDLEQTHIDPEASNRWLKLGYLFPETEGFLIAIQDQVINTKNYKKYIIKDPNVQNDRCRKCQRQSETIQHITGACQTLTQTDYTHRHNQIVHIIHQKLAAKHKLISDKHTPYYQYTPKPVLESNNHRMYFDRAILTDKTIHNNRPDITLIDKIKKEVYLIDIAVPNTHNIQKTITEKIQKYTELKEEVHRIWKMRNVFIVPLVLSSTGVIPKHLTHSLKIIGLAENTHINMQKAAILNTCRIVRKFLQEDAVNQPTTEHTAHLA

SEQ ID NO: 32945 - protein, 1284 aa, Ennomos fuscantarius
METRQKKLRIGPLPEGDRRGTSVAGHGRDSMLASGSRTDGCTGVGDAGGRGKSSRITAEQSASRSTVDTPTADVSQESCVNQPVTTKAGKPRVRMKWDDDMNLFIMRTYYLVTKLETDKTMYGKKLFDQFKIKYPQLNITAQRIADQRRVIIRNKLLPDHVISNLKEEIAEQLKEEEVYSTIELQHDIHPSITNETFTSQPNFPLTQPYSTQNTPCSTQTIEEITATQYSDASTQTMMITNVHNIETQNSQPSTVQTATTIIPPPNTIQNIVRQLENTLRLYTGTDPTSRPKLPKLKENKKLYQYIDIFNREILGRFHSVDSNIHDIHTLVYCSAFVICENLGYKIKIEYPDNRKNKSIPEKPAWQIRIENDVKKLRADIGRVTQYINNNRSKKLVNKVEIIFNNTKVHSSHEKNNIRPEEYLDTLKQKLALKTQRLARYKKALQRKEDNKLFTTNEKGFYRSLRNEATTNNSELPNSVELKKLWTDLWKKQNDHNDRAGWIREEEKRWEHIEEMEFTDISVQDIELVTKKTKNWKAAGIDGVHNFWYKKFCILHDALARITTDLLKGIDELPSFITKGITYMLPKNNDTTNPSQYRPITCLPTIYKIITSCITNKIKYHLTQNNILAEEQKGCRQYHKGCKEQLIIDSTILKHAQTHNRNIHISYIDYKKAFDSVPHSWLIRILQIYKINPTIITFLENAMNDWKTRLYLTNNSQSICTDEILIENGIFQGDSLSPLWFCLALNPLSNLLNKEKNGYKLTAHTEISHLMYMDDIKLFSKSEKALKTLIQKTTQFSEDINMSFGLDKCKTLHIRKGKIINTNNDADDSSENNFTHMEIDDTYKYLGIHQSRTVNHTAIKNKLTQEYTRRLNLICKRPLSSRNLFKAINTYAVPILTYSFGVIKWFRTDINRLEIKTRTTLTKHNYLHPKSAIERMTVKRLKGGRGLIDLKKLWEGQIQNLQKFFHSKSETSKIHLATIETDQNYTPLNLISKSTFTTSLEDPEIEKMNAWRRKEVHGRHLHDLEKTYIDLEASNKWLKLGYLFPETEGFLIAIQDQVINTKNYKKYIIKDPNVQNVRCRKCQRQSETIQHIIGACQTLTQTDYTHRHNQIAHIIHQKLAVKHKLIPDNQPPYYQYTPKPILESNNYRMYFDRAILTDKTIHNNRPDITLIDKIKKEVHLIDIAVPNTHNIQKTITEKIQKYTELKEEVHRIWKMKNVYIVPLVLSSTGVIPKHLPHSLKIIGLPENTYINMQKAAILNTCRIVRKFLQEDSITQPMTEHTAHLV

SEQ ID NO: 32946 - protein, 1277 aa, Ennomos quercinarius
METRQRKLRIGPLPEGDRRGTSVAGRGRDSMLASGSRTDGCTGVGDGGVREKSSRITAEQSESSSRADTPTEDVSQETCVNQPVTTKAGKPKVRMKWDDDINVFIMRTYYLVTKLETDKTMYCKKLFDQFKIKYPQLNVTAQRIADQRRVIIRNKLLPDHIIGNLKKEIAEQLREEELHSTIESRHDEHPPITIDTFTSQPSYPSTQAYSTQITPSGTQTTNETILTQSTDASTQTLIIPNVHNSETQNLQPITALANTTIQNLVHQLEATLTLYTGTDPTSKPKLPKLKENKKLYQYIDIFNKEILGRFYSIDSDVNDIHTLVYCSAFVICDNLGYKIKTEHADNRNNKNIPEKPAWQIRIENDIKALRADIGRVTQYINNNRSKKLVKKVEKIFNSTKVHSSHERDNIRPEEYLDTLKQKLALKTQRLARYKKALQRKEDNKLFSTNEKGFYRSLRNEVTTKNSELPNPEELKNYWADLWKKQNEHNDRADWIREEEKRWEHIEEMEFTDISGEDIELVTKKTKNWKAAGIDGIHNFWYKKFFILHDTLARIVTDLLKGIDELPKFITKGITYMLPKSNDTANPSQYRPITCLPTIYKIITSCITTKINYHLSQNNILAEEQKGCRQYHKGCKEQLIIDSTILKHAQTHNRNIHISYIDYKKAFDSVPHSWLIRILQIYKINPTIITFLENAMNDWKTRLFLTNSSQSISTDEILIENGIFQGDSLSPLWFCLALNPLSNLLNKALSGYKLTTHTEISHLMYMDDIKLFSKSEKALKALLQKTTQFSDDINMSFGLDKCKTLHIRKGKIIGTNDDDEDSVENNFARMENDDTYKYLGIHQSKTVNHTAIKNKLTQEYTRRLNLICKRPLTSKNLFKAINTYDVPILTYSFGVIKWSRTDINNLEIKTRTTLTKHNYSHPKSAIERMTVKRLKGGRGLIDLKKLWEGQVQNLQKFFHNKSETSKIHLATIETDQNYTPLNLKSINTCTTSQEDPETEKINSWRRKELHGRHLHDLEQTHIDPEASNRWLKLGYLFPETEGFLIAIQDQVINTKNYKKYIIKDPNVQNDRCRKCQRQSETIQHITGACQTLTQTDYTHRHNQIVHIIHQKLAAKHKLISDKHTPYYQYTPKPVLESNNHRMYFDRAILTDKTIHNNRPDITIIDKIKKEVYLIDIAVPNTHNIQKTITEKIQKYTELKEEVHRIWKMRNVFIVPLVLSSTGVIPKHLTHSLKIIGLTENTHINMQKAAILNTCRIVRKFLQEDAVTQPTTEHTAHLA

SEQ ID NO: 32947 - protein, 770 aa, Ennomos quercinarius
MEFTDISGEDIELVTKKTKNWKAAGIDGIHNFWYKKFFILHDTLARIVTDLLKGIDELPKFITKGITYMLPKSNDTANPSQYRPITCLPTIYKIITSCITTKINYHLSQNNILAEEQKGCRQYHKGCKEQLIIDSTILKHAQTHNRNIHISYIDYKKAFDSVPHSWLIRILQIYKINPTIITFLENAMNDWKTRLFLTNSSQSISTDEILIENGIFQGDSLSPLWFCLALNPLSNLLNKALSGYKLTTHTEISHLMYMDDIKLFSKSEKALKALLQKTTQFSDDINMSFGLDKCKTLHIRKGKIIGTNDDDEDSVENNFARMENDDTYKYLGIHQSKTVNHTAIKNKLTQEYTRRLNLICKRPLTSKNLFKAINTYAVPILTYSFGVIKWSRTDINNLEIKTRTTLTKHNYSHPKSAIERMTVKRLKGGRGLIDLKKLWEGQVQNLQKFFHNKSETSKIHLATIETDQNYTPLNLKSINTCTTSQEDPETEKINSWRRKELHGRHLHDLEQTHIDPEASNRWLKLGYLFPETEGFLIAIQDQVINTKNYKKYIIKDPNVQNDRCRKCQRQSETIQHITGACQTLTQTDYTHRHNQIVHIIHQKLAAKHKLISDKHTPYYQYTPKPVLESNNHRMYFDRAILTDKTIHNNRPDITLIDKIKKEVYLIDIAVPNTHNIQKTITEKIQKYTELKEEVHRIWKMRNVFIVPLVLSSTGVIPKHLTHSLKIIGLAENTHINMQKAAILNTCRIVRKFLQEDAVTQPTTEHTAHLA

SEQ ID NO: 32948 - protein, 1053 aa, Ennomos quercinarius
MILLLIYLIRSIEGSFTVHNSETQNFQPITALANTTIQNLVHQLEATLTLYTGTDPTSRPKLPKLKENKKLYQYIDIFNKEILGRFYSIDSDVNDIHTLVYCSAFVICDNLGYKIKTEHADNRNNKNIPEKPAWQIRIENDIKALRADIGRVTQYIKNNRSKKLVKKVEKIFNSTKVHSSHERDNIRPEEYLDTLKQKLALKTQRLARYKKALQRKEDNKLFSTNEKGFYRSLRNEVTTKNSELPNPEELKNYWADLWKKQNDHNDRADWIREEEKRWEHIEEMEFTDISGEDIELVTKKTKNWKAAGIDGIHNFWYKKFFILHDTLARIVTDLLKGIDELPKFITKGITYMLPKSNDTANPSQYRPITCLPTIYKIITSCITTKINYHLSQNNILAEEQKGCRQYHKGCKEQLIIDSTILKHAQTHNRNIHISYIDYKKAFDSVPHSWLIRILQIYKINPTIITFLENAMNDWKTRLFLTNSSQSISSDEILIENGIFQGDSLSPLWFCLALNPLSNLLNKALSGYKLTTHTEISHLMYMDDIKLFSKSEKALKALLQKTTQFSDDINMSFGLDKCKTLHIRKGKIIGTNDDDEDSVENNFARMENDDTYKYLGIHQSKTVNHTAIKNKLTQEYTRRLNLICKRPLTSKNLFKAINTYAVPILTYSFGVIKWSRTDINNLEIKTRTTLTKHNYSHPKSAIERMTVKRLKGGRGLIDLKNLWEGQVQNLQKFFHNKSETSKIHLATIETDQNYTPLNLKSINTCTTSQEDPETEKINSWRRKELHGRHLHDLEQTHIDPEASNRWLKLGYLFPETEGFLIAIQDQVINTKNYKKYIIKDPNVQNDRCRKCQRQSETIQHITGACQTLTQTDYTHRHNQIVHIIHQKLAAKHKLISDKHTPYYQYTPKPVLESNNHRMYFDRAILTDKTIHNNRPDITLIDKIKKEVYLIDIAVPNTHNIQKTITEKIQKYTELKEEVHRIWKMRNVFIVPLVLSSTGVIPKHLTHSLKIIGLAENTHINMQKAAILNTCRIVRKFLQEDAVNQPTTEHTAHLA

SEQ ID NO: 32949 - protein, 1282 aa, Peribatodes rhomboidaria
MMETRNNKLRIGPLPGGDRRGTSVAGHGRDSMLASDSRLGGWAGVGDAGGRGMSSRTTADSGESRSNSRADTPATDVSHETCVNQPATTKAGKPRVRMKWDNDINLFIMRTYLEITKLETDRTMYCKKLFEHFKLKYPHLNVSSQRVADQRRAIIRNKLLPDNVIDDLRKEISAQLNQEEISFTVSHSPNIGPSITFHSTASQPDHISTQDMHTPHTPSTQTPFTLPLIEQKLSTLTTDASTQTFTLSNTHNTTIQISDQPFSEATRQDLLHQMETTLTLYAGTDPTTRPKLPKLRESKKLYQLVDIFNKQILDKFLSIDIDITEFHTLIYCSALVISEQLGYKIKEEHQTHKNYKNKPDTPAWQIRIENNIKSLRADIGRVTQYINNNRSKKVVKYVEKIFNATKVHSSHEKDNIRPEEYLDTLKQKLALKSQRLARYKKALERKCDNKLFLSNEKGFYRSLRKDVTNKKFDLPNPDDLKSYWTDLWKKQKDHNDTADWIKDEENRWSHIEEMEFIDITGEDIEMITKKTKNWKAAGIDGIHNFWYKKFFILHDVLARIISDLLKGTAELPRFITKGITYMLPKSNDTTNPTQYRPITCLPTIYKIITSCITHKINVHLTTHNIIAEEQKGCRQHHKGCKEQLIIDSTVLKHAQTHNRNIHISYIDYKKAFDSVPHSWLIRILQIYKINPTIITFLENAMIEWKTRLVLSNSVQSISTDEIPIENGIFQGDSFSPLWFCLILNPLSHLLNSENCGYKMTTDTEISHLMYMDDIKLFSKSEKALNRLIQLTSEFSKDINMSFGLDKCRTLHIHKGKIIKTNYDRDNSETHFAQMETADMYKYLGILQSKTINHTQIKKKLTEEYTRRLNLICKRSLFSKNLFKAINTYAIPVLTYSFGVIKWSRTDINQLEIKTRTTLTKHNNLHPKSAIERISVKRLKGSRGFIDLKVLWEGQVNNLRKFFYTKAEFSNIHLATVESDKSFTPLNLKIRDIQTRSLKAAETDKINTWRRKELHGRHLHDLEQDHIDLEASNKWLKLGSLFPETEGFMIAIQDQVINTKNYRKYIIKDPNVQNDNCRKCHRQSETIQHITSACPTLAPTDYTHRHNQISHIIHQKLAIKYKLIPNKTTPYYQYNPRPVLESTRHKLYYDRAILTDKTIHNNRPDITLIDKQDKIVVLIDIAVPNTHNLHRTITEKINKYTELKEEILRIWKMNKVYIVPLVLSSTGVIPKHLLQSLKILDISENTYMTMQKAAILNTCRIVRKFLQEDLNNPQQVEHEAHLA

SEQ ID NO: 32950 - protein, 1272 aa, Dyscophellus porcius
MRLRNRQIPQAGTREGESRPGPSGSGCPTYSGGGNVSHKTAQSRTVAANSSPSYVNSDSSSSTSESRSISRADSPAEDVSQAASTNQPATTKAGKPRVRMKWDYEINLFIMRTYLEVTKLETDKTMYCKKLYDQFKLKYPHLKVSAQRIADQRRVIIRNKLLTDKVIEDLRKDISEQLNQEQALSTITHTPSIYPPITRNSLSPHSSHLSNQNSNSINPIEEILSTLTSDASTQTLTLHNTHCTANQNLDQTTKYTNLNIQNILHQLDTTLTLYTGTDPTARPKLPRLKESNQLYRLVHIFNKEILCKYYTIDTDITKLHTLIYCSALVISENLGYKIRQVQLTNTNKNSKTNNPAWQIRIENDIKELRASIGRVTQFINNNRSKKILKHVDKIFKATKVHSSHEKDNIRPEEYLDTLKQKLALKAQRLARYKKALQRKNDNSLFSNNEKAFYRTLRNESGRYCDLPNPEDLKNYWADLWKKRKDHNDRANWIRDEEIRWSHIEEMQFTDITGEDISIITRRTKNWKAAGIDGVHNFWFKKFSVLHNILARIISDLINGVVELPQFVTKGITYMLPKNNDTTNPSQYRPITCLPTIYKIITSCITHKINNHVIQHNIIAEEQKGCRQQHRGCKEQLIIDSTVLKHAQVHNRNINICYIDYKKAFDSVPHSWLIRILQIYKINPTIISFLKCIMTEWKTKLILSNSVQSITTEEISIGNGIFQGDSLSPLWFCLALNPLSYLLNSEKSGYKLTTGTEICHLMYMDDIKLFSRSEIALSKLIVKTTQYSNDINMSFGLDKCRTLNIHKGKIKNIIRDTDNNESNFAQMETNDAYKYLGIFQSKTINHTQIKKKLSEEYTRRLNLICKTSLYSKNLFKAINTFAIPVLTYSFGVIKWSQTDINQLEIKTRTTLTKYNNLHPKSAIERMSIKRLKGGRGLIDLKVLWEAQISNLRIFFYQKAETSDIHLATVELDNNYTPLNLKNRNIPIRSPTSAETDKIDTWRRKELHGRHLHDLEQAHIDLEASNKWLQLGSLFPETEGFMIAIQDQVINTKNYRKYIIKDPNMQNDICRKCHRHPETIQHIINACPTLTQTDYTHRHNQVTHIIHQKLAIKHKLLPNYTAPYYQYSPKPVLESTKHKMYYDRAILTDKTIHNNRPDITLIDKQDKIVYLIDIAVPNTHNLHRTITDKINKYTELKEEILRIWKMNKVYIVPLVLSSTGVIPKHLLQSLKIIDIPDNTYITMQKASILNTCRIVRKFLLEDNLQHIEHEAHLA

SEQ ID NO: 32951 - protein, 769 aa, Peribatodes rhomboidaria
MEFIDITGEDIEMITKKTKNWKAAGIDGIHNFWYKKFFILHDVLARIISDLLKGTAELPRFITKGITYMLPKSNDTTNPTQYRPITCLPTIYKIITSCITHKINVHLTTHNIIAEEQKGCRQHHKGCKEQLIIDSTVLKHAQTHNRNIHISYIDYKKAFDSVPHSWLIRILQIYKINPTIITFLENAMIEWKTRLVLSNSVQSISTDEIPIENGIFQGDSFSPLWFCLILNPLSHLLNSENCGYKMTTDTEISHLMYMDDIKLFSKSEKALNRLIQLTSEFSKDINMSFGLDKCRTLHIHKGKIIKTNYDRDNSETHFAQMETADMYKYLGILQSKTINHTQIKKKLTEEYTRRLNLICKRSLFSKNLFKAINTYAIPVLTYSFGVIKWSRTDINQLEIKTRTTLTKHNNLHPKSAIERISVKRLKGGRGLIDLKVLWEGQVNNLRKFFYTKAEFSNIHLATVESDKSFTPLNLKIRDIQTRSLKAAETDKINTWRRKELHGRHLHDLEQDHIDLEASNKWLKLGSLFPETEGFMIAIQDQVINTKNYRKYIIKDPNVQNDNCRKCHRQSETIQHITSACPTLAPTDYTHRHNQISHIIHQKLAIKYKLIPNKTTPYYQYNPRPVLESTRHKLYYDRAILTDKTIHNNRPDITLIDKQDKIVVLIDIAVPNTHNLHRTITEKINKYTELKEEILRIWKMNKVYIVPLVLSSTGVIPKHLLQSLKILDISENTYMTMQKAAILNTCRIVRKFLQEDLNNPQQVEHEAHLA

SEQ ID NO: 32952 - protein, 1282 aa, Peribatodes rhomboidaria
MMETRNNKLRIGPLPGGDRRGTSVAGHGRDSMLASDSRLGGWAGVGDAGGRGMSSRTTADSGESRSNSRADTPATDVSHETCVNQPATTKAGKPRVRMKWDNDINLFIMRTYLEITKLETDRTMYCKKLFEHFKLKYPHLNVSSQRVADQRRAIIRNKLLPDNVIDDLRKEISAQLNQEEISFTVSHSPNIGPSITFHSTASQPDHISTQDMHTPHTPSTQTPFTLPLIEQKLSTLTTDASTQTFTLPNTHNTTIQISDQPFSEATRQDLLHQMETTLTLYAGTDPTTRPKLPKLRESKKLYQLVDIFNKQILDKFLSIDIDITEFHTLIYCSALVISEQLGYKIKEEHQTHKNYKNKPDTPAWQIRIENNIKSLRADIGRVTQYINNNRSKKVVKYVEKIFNATKVHSSHEKDNIRPEEYLDTLKQKLALKSQRLARYKKALERKCDNKLFLSNEKGFYRSLRKDVTNKKFDLPNPDDLKSYWTDLWKKQKDHNDTADWIKDEENRWSHIEEMEFIDITGEDIEMITKKTKNWKAAGIDGIHNFWYKKFFILHDVLARIISDLLKGTAELPRFITKGITYMLPKSNDTTNPTQYRPITCLPTIYKIITSCITHKINVHLTTHNIIAEEQKGCRQHHKGCKEQLIIDSTVLKHAQTHNRNIHISYIDYKKAFDSVPHSWLIRILQIYKINPTIITFLENAMIEWKTRLVLSNSVQSISTDEIPIENGIFQGDSFSPLWFCLILNPLSHLLNSENCGYKMTTDTEISHLMYMDDIKLFSKSEKALNRLIQLTSEFSKDINMSFGLDKCRTLHIHKGKIIKTNYDRDNSETHFAQMETAAMYKYLGILQSKTINHTQIKKKLTEEYTRRLNLICKRSLFSKNLFKAINTYAIPVLTYSFGVIKWSRTDINQLEIKTRTTLTKHNNLHPKSAIECISVKRLKGGRGLIDLKVLWEGQVNNLRKFFYTKAEFSNIHLATVESDKSFTPLNLKIRDIQTRSLKAAETDKINTWRRKELHGRHLHDLEQDHIDLEASNKWLKLGSLFPETEGFMIAIQDQVINTKNYRKYIIKDPNVQNDNCRKCHRQSETIQHITSACPTLAPTDYTHRHNQISHIIHQKLAIKYKLIPNKTTPYYQYNPRPVLESTRHKLYYDRAILTDKTIHNNRPDITLIDKQDKIVVLIDIAVPNTHNLHRTITEKINKYTELKEEILRIWKMNKVYIVPLVLSSTGVIPKHLLQSLKILDISENTYMTMQKAAILNTCRIVRKFLQEDLNNPQQVEHEAHLA

SEQ ID NO: 32953 - protein, 1271 aa, Pyrgus malvae
MRLRGRLIPQAGTREGESRPEPSGSGSPSYSGVGNVSHITAQSCAVAVDTTSSCPAKSRENRSKDRISTPVADVSQAASVNQPATTKAGKPRVRMMWGDDINIFIMRTYFEVTKAETDRTMYGQKLFEKFKVRYPHISVSAQRIADQRRVIVRNKLLSDKIIQDLKNEILDNLKREEMSSTNTQSPSIHLSSTNQGNLNHSVNFSSQNEPSTLPIEETLSALTSEASTQTFTSTPYTHPVDIKIPDNQLTATQTQNLIQQLETTLTLYTGTDPTVRPKLPKLKESKVLYQLVDTFNKEILGRFYSVDTGITELHTLIYCSAVVISENLGFKIKKEVNTINKNNLKKKAVTPAWKIRIENDVKQLRADIGRVTQYINNNRSKRVVKLVEKIFKATRIHSTHEKNNIRPEEYLDTLKQKLALKSQRLARYKKSLQRKTDNKLFTNNEKAFYRSFCNEKNDNNFDLPDPDDLKNYWTNIWRKQCDHNTEADWIKEEEQRWSQLKEMEFTNITGEDIELIVNKTKNWKAAGVDSIHNFWYKKFYKLHDTLARIITELIKGTSDLPKFITTGITYMLPKSNKTTNPSQYRPITCLPTIYKIITSCITQKINIHLTQHNILAEEQKGCRQHHKGCKEQLIIDSTVLKHAQTHKTNLHISYIDYRKAFDSLPHSWLIHILQIYKISPTIVAFLKNTMSEWNTRLILSNSSQVISTDEIPIENGIFQGDSFSPLWFCVALNPLSHILNTQNCGYRLTKETEISHLLYMDDIKLFSKSDKALDTLILKTTQFSKDINMSFGLDKCRTLHIRKGKFFDSKVDNSNEDINFTRMETTDTYKYLGIFQSNTINHTQLKNKLKLEYSRRLNLICKKSLLSKNLFKAINTYAVPVLTYTFGIIKWSRTDINQLEILTRTILTKHNNLHPKSAIERISIKRHNGGRGLIDLKVLWEKQVNSLRNFFYDKSESSKIHSAIVNLDKNFTPLNLKTKDTQIKSPKTAEKDKLDTWRRKELHGRHLHDLEQPHIDSDASNKWLQMGSLFPETEGFMIAIQDQVINTKNYRKHIIKDPNMKNDSCRKCHRQPETIQHITSACPTLTQTDYTHRHNQIAHIIHQKLAIAHKLIPNKTSPYYQYKPKPVLENTTHKLYYDRAILTDKTIHNNRPDITLIDKQDKVVFLIDIAVPNTHNLHRTITEKINKYTELKEEIKRIWKMNKVYIVPLVLSNTGVIPKHLLHSLKLLNIHVTTYFTMQKAAILNTCRIVRKFLQEDLNMQPVIEDEIHLA

SEQ ID NO: 32954 - protein, 1284 aa, Pholisora mejicanus
MTNGALVNTKYAMRLRSRLVPQAGTREGESRPETAVSGSPAYSGGGNVSHFTAQSNTVAVDKTASHLASSKESRSSNRPKTPAADVSQEPCVNHPVTTKAGKLRVRMKWDDDINLFIMRTYLEITKLETDRTMYCKKLFDQFKLKYPDLNVTAQRIADQRRVIIRNKLLSDKVIEELKKEISEKLNQEEISTTIPTTPVCHTSITHRRHTSQPDQTLSQNETFSQLLPEEIPSTLTSDATTQTFMLPNLHTETIDIPLQSPTDTHVEDLIHQLKTYLTLYTGIDPTARPKLPRLKENKKLYRFVNIFNKEILNKFYSIDTDITQFQTLIYCSALVITENLGFKIKREVEINNRKFKEHETAVPHWQSRIEEEIKQLRADIGRVTQYVKNNRSKKLVKHVEKIFKSTKIHSSHEKDNIRPEEHLDTLKQKLTLKSQRLARYKKALQRKTDNKLFVNNEKGFYRSLNSNSSNTFDLPSTEDLKNYWTNIWKKQKDHNEEAEWIKNEEHRWKHIEEMKFIDITREDIEFIAKKTKNWKATGIDGVHNFWYKKFYILHDVLARIITDILKGTSDLPTFVTKGITYMIPKNNDTTNPSQYRPITCLPTIYKIITSCITHKINIHITQHNIIAEEQKGCRQNHRGCKEQLIIDSAVLKHAQTHSRNIHISYIDYQKAFDSVPHSWLVRILQIYKINPTIITFLKKAMSEWKTSLVLSNYSQSIVTDEIPIENGIFQGDSFSPVWFCLALNPLSHLLNNEKCGYSLTPETEISHLMYMDDIKLFSKTEKSLNQLIHKTTQFSTDINMFFGLDKCKTLHVRKGKVNDTHEDNRNNVDKFKIMEASDTYKYLGIYQSRNINHSQIKKDLCKEYIRRLNLICKKSLLSKHLFKAINTYAIPVLTYTFGIIKWSRTDINNLEINTRTTLTKYNNLHPKSAIERINVKRLKGGRGLTDLKVLWEKQVDNLRNFFYNKSETSNIHLAIVNIDNRLTPLNLKTKDILISTLETAETNKIDNWRKKELHGRHLYDLEQNHIDLEASNKWLQLGSLFPETEGFIIAIQDQVIKTKNYRKYIIKDPSVQNDSCRKCHRQSETIQHITSACSSLTQTDYTHRHNQIAHIVHQKLAIKHKLITGKIMPYYQYVPKPVLENQSHKIYFDRAILTDKTIHNNRPDITLIDKINKQTYIIDIAVPNTHNIQKTITDKIHKYTELKEEIGRIWKMNKVYIVPLVLSSTGVIPKHLHHYLKLIDLPINIYITMQKAAILNTCRIVRKFMQEDSDPDSNHTPPNELHLV

SEQ ID NO: 32955 - protein, 1068 aa, Pyrgus malvae
MDSWTHTKAMTQITRSACLLIHNNNNNNNDQRRVIVRNKLLSDKIIQDLKNEILDNLKREEMSSTNTQSPSIHLSSTNQGNLNHSVNFSSQNEPSILPIEETLSALTSEASTQTFTSTPYTHPVDIKIPDNQLTATQTQNLIQQLETTLTLYTGTDPTVRPKLPKLKESKVLYQLVDTFNKEILGRFYSVDTGITELHTLIYCSAVVISENLGFKIKKEVNTINKNNLKKKAVTPAWKIRIENDIKQLRADIGRVTQYINNNRSKRVVKLVEKIFKATRIHSTHEKNNIRPEEYLDTLKQKLALKSQRLARYKKSLQRKTDNKLFTNNEKAFYRSFCNEKNYNNFDLPDPDDLKNYWTNIWRKQCDHNTEADWIKEEEQRWSQLKEMEFTNITGEDIELIVNKTKNWKAAGVDSIHNFWYKKFYKLHDTLARIITELIKGTSDLPKFITTGITYMLPKSNKTTNPSQYRPITCLPTIYKIITSCITQKINIHLTQHNILAEEQKGCRQHHKGCKEQLIIDSTVLKHAQTHKTNLHISYIDYRKAFDSLPHSWLIHILQIYKISPTIVAFLKNTMSEWNTRLILSNSSQVISTDEIPIENGIFQGDSFSPLWFCVALNPLSHILNTQNCGYRLKKETEISHLLYMDDIKLFSKSDKALDTLILKTTQFSKDINMSFGLDKCRTLHIRKGKFFDSKVDNSNEDINFTRMETTDTYKYLGIFQSNTINHTQLKNKLKLEYSRRLNLICKKSLLSKNLFKAINTYAVPVLTYTFGIIKWSRTDINQLEILTRTILTKHNNLHPKSAIERISIKRHNGGRGLIDLKVLWEKQVNSLRNFFYDKSESSKIHSAIVNLDKNFTPLNLKTKDTQIKSPKTAEKDKLDTWRRKELHGRHLHDLEQPHIDSDASNKWLQLGSLFPETEGFMITIQDQVINTKNYRKHIIKDPNMKNDSCRKCHRQPETIQHITSACPTLTQTDYTHRHNQIAHIIHQKFAIAHKLIPNKTSPYYQYKPKPVLENTTHKLYYDRAILTDKTIHNNRPDITLIDKQDKVVFLIDIAVPNNTISIELKQRK

SEQ ID NO: 32956 - protein, 1274 aa, Pyrrhopyge creona
MRLRNRQIPQAGTREGESRPGPSGSGCPTYSGGGNVSHRTAQSRTVAANSSPSYVTSDLSSSTSTSRNRSRADSPVEDVSQAASANQPATTKAGKPRVRMKWDYDINLFIMRTYLQVTKLETDRTMYCKKLYDQFKVRYPHLKVSAQRIADQRRVIIRNKLLTDKVIEDLRKDISEQLNQEQALSTITHTPPIHPPVTHNSLSPQSNHLSNQNTLSTNPITEEILSTLTSNASTQTLILHNTHCTANQSQDQTANYTNFNIQNLLHQIDTTLTLYTGTDPTARPKLPRLKESKKLYQLVDIFNKEILYKYYTIDTDITKLHTLIYCSALVISENLGYKIKRVQQTNTNKNSKAKTPAWQIRIENDIKELRASIGRLTQYINNNRSKKILKHVDKIFKATKVHSSHEKDNIRPEEYLDTLKQKLALKSQRLARYNKALQRKNDNSLFSNNEKAFYRTLRNNEPDRYCNLPNPEDLKNYWTSLWKKHRDHNDRANWIRDEETRWSHIEEMQFTDITEEDIAIITRQTKNWKAAGIDGVHNFWYKKFSVLHNILARIISDLIKGVVELPQFVTKGITYMLPKNTDTTNPSQYRPITCLPTIYKIITSCITHKINKHVTKHNIIAEEQKGCRQQHRGCKEQLIIDSTVLKHAKVHNRNIHICYIDYKKAFDSVPHSWLIRILQIYKINPTIITFLECIMTEWKTRLILSNSAQSIVIEEISIRNGIFQGDSFSPLWFCLALNPLTHLLNSEKSGYKLTAETQICHLMYMDDIKLFSESEIALNKLIVKTTQYSNDINMSFGLDKCRTLHIHKGKIKNISKDINNSETIFTRMETNDTYKYLGIFQSKTINHTQIKKKLSEEYKRRLNLICKTSLYSKNLFKAINTFAIPVLTYSFGVIKWSQTDINQLEIKTRTTLTKYNNLHPKSAIERMSIKRLKGGRGLVDLKALWEAQISNLRMFFYDKANTSNIHLATVEIDNDFTPLNLKNRNISIRSPSSAEANKIDTWRRKELHGRHLHDLEQAHIDLEASNKWLKLGSLFPETEGFMIAIQDQVINTKNYRKYIIKDPHIQNDNCRKCHRQPETIQHIISACPTLTQTDYTHRHNQVTHIIHQKLAIKHKLLPSYITPYYQYSPKPVLESTRHKMYYDRAILTDKTIHNNRPDITLIDKEDKIVYLIDIAVPNTHNLHRTITDKINKYTELKEEILRIWKMNKVYIVPLVLSSTGVIPKHLLQSLKVIDIPDNTYITMQKASILNTCRIVRKFLLEDSLQHVEHEAHLA

SEQ ID NO: 32957 - protein, 1166 aa, Muschampia nomas
MRTYLEVTKLETDRTMYCKKLFDQFKLKYPHINVSAQRIADQRRVIVRNKLLSDKVIEEIRTEISEKINQEKISTITYKPDTHTSNSDKSTTQLDHTLYPNEKSTQLLPIQTLSILTSDASTQTCTLTNTNTEITEIPSQLITKTNTQDLIDQLQTSLTLYTGTDPTARPKLPRLKENKELYRLLDIFNKEILGKFYSVNFDITQLHTLIYCSALVITENLGFKVKREHLSNKKYKEYKMVIPDWQTRIENEIKQLRIDIGRVTQYVKNNRSKKLVKHVEKIFQKTKIHSSHEKNNIRPEEHLDTLKQKLSLKSQRLARYKKSLQRKKDNKLFVNNEKEFYRSLSNQSNNNFDLPKIEELKSYWTNIWQKQKDHNDESEWIKHEEERWKHIDEMKFTEITREDIEFITKNTKNWKATGIDGIHNFWYKKLFILHDVTARIITDILNGIAELPKFVTKGITYMLPKSNDTNNPSQYRPITCLPTIYKIITSCVKLKINAHITQHNIIAEEQKGCRQNHKGCKEQLIIDSTVLKHAQNHSRNIHISYIDYQKAFDSVPHSWLIRILQIYKINSKIITFLKCAMFDWNTRLVLYNRSQSLTSDDIKIENGIFQGDSFSPVWFCLALNPLSHLLNNEKYGYSLTTDTEISHLMYMDDIKLFSKTEKGLNRLIQKTRQFSNDINMSFGTEKCKTLHIHRGKVTNNIDDNSNKEDKFTVMEASDTYKYLGIYQSRNINHSQIKKDLSKEYTRRLNLICRKTLISKNLFKAINTYAIPVLTYTFGIIKWSRTDINHLEITTRTILTKYNNLHPKSAIERISIKRSKGGRGLIDLKVLWERQIHNLRNFFLTKADSSNIHLAIVNLDKCYTPLNLNNRDIPFTSRETIEMNKIDHWRRKELHGRHLHDLEQNYIDLEASNKWLKLGSLFPETEGFMIAIQDQVIRTKNYLKYIIKDANIQDDSCRKCHRHPETIQHITSACPTLTQTDYTHRHNQIANIVHQKLAAKHKLISDKIVPYYQYVPKPVLESQSHKIYFDRAILTDKTIHNNRPDITMIDKINKLTYIIDIAVPNTHNIQKTITDKIHKYTELKDEILRIWKMNKVYIVPLVISSTGIIPKHLHHYLQLIDLPMNIYITMQKAAILNTCRIVRKFLQDDYVTNSKSGKTLPNELHLV

SEQ ID NO: 32958 - protein, 1274 aa, Pyrrhopyge kelita
MRLRNRQIPQAGTREGESRPGPSGSGCPTYSGGGNVSHRTAQSRTVAANSSPSYVTSDLSSSTSTSRNSSRADSPVEDVSQAASANQPATTKAGKPRVRMKWDYDINLFIMRTYLEVTKLETDRTMYCKKLYDQFKVRYPHLKVSAQRIADQRRVIIRNKLLTDKVIEDLRKDISEQLNQEQALSTITHTPPIHPPVTHNSLSPQSNHLSNQNTLSRNPITEEILSTLTSDASTQTLILHNTHCTTNQSLDQTANYTNFNIQNLLHQIETTLTLYTGTDPTARPKLPRLKESKKLYQLVDIFNKEILYKYYRIDTDITKLHTLIYCSALVISENLGYKIRRVQQTNTNKNSKANTPAWQIRIENDIKELRASIGRLTQYINNNRSKKILKHVDKIFKATKVHSSHEKDNIRPEEYLDTLKQKLALKSQRLARYKKALQRKKDNNLFSNNEKAFYRTLRNNEPGRYCNLPNPEDLKNYWTSLWKKHRDHNDRANWIRDEETRWSHIEEMQFTDITEEDVAIITRQTKNWKAAGIDGVHNFWYKKFSVLHNILARIISDLIKGVVELPQFVSKGITYMLPKNNDTTNPSQYRPITCLPTIYKIITSCITHKINNHVTKHNIIAEEQKGCRQQHRGCKEQLIIDSTVLKHAKVHNRNIHICYIDYKKAFDSVPHSWLIRILQIYKINPTIITFLECIMTEWKTRLILSNSAQSIVIEEISIRNGIFQGDSFSPLWFCLALNPLTHLLNSEKSGYKLTAETQICHLMYMDDIKLFSESEIALNKLIVKTTQYSNDINMSFGFDKCRTLHIHKGKIKNISKDINNSETIFTRMETNDTYKYLGIFQSKTINHTQIKKKLSEEYKRRLNLICKTSLYSKNLFKAVNTFAIPVLTYSFGVIKWSQTDINQLEIKTRTTLTKYNNLHPKSAIERMSIKRLKGGRGLVDLKALWEAQISNLRMFFYHKANTSNIHLATVELDNDFTPLNLKNRNISIRSPSSAEADKIDTWRRKELHGRHLHDLEQAHIDLEASNKWLKLGSLFPETEGFMIAIQDQVINTKNYRKYIIKDPHIQNDNCRKCHRQPETIQHIISACPTLTQTDYTHRHNQVTHIIHQKLAIKHKLLPSYTTPYYQYSPKPVLESTRHKMYYDRAILTDKTIHNNRPDITLIDKEDKIVYLIDIAVPNTHNLHRTITDKINKYTELKEEILRIWKMNKVYIVPLVLSSTGVIPKHLLQSLKVIDIPDNTYITMQKASILNTCRIVRKFLLEDNLQHVEHEAHLA

SEQ ID NO: 32959 - protein, 1274 aa, Pyrrhopyge papius
MRLRNRQIPQAGTREGESRPGPSGSGCPTYSGGGNVSHRTAQSRTVAANSSPSYVTSDLSPSTSTSRNSSRADSPVEDVSQAASANQPATTKAGKPRVRMKWDYDINLFIMRTYLEVTKLETDRTMYCKKLYDQFKVRYPHLKVSAQRIADQRRVIIRNKLLTDKVIEDLRKDISEQLNQEQALSTITHTPPIHPPVTHNSLSPQSNHLSNQNTLSRNPITEEILSTLTSDASTQTLILHNTHCTTNQSLDQTANYTNFNIQNLLHQIETTLTLYTGTDPTARPKLPRLKESKKLYQLVDIFNKEILYKYYTIDTDITKLHTLIYCSALVISENLGYKIRRVQQTNTNKNSKANTPAWQIRIENDIKELRASIGRLTQYINNNRSKKILKHVDKIFKATKVHSSHEKDNIRLEEYLDTLKQKLALKSQRLARYKKALQRKKDNSLFSNNEKAFYRTLRNNEPGRYCNLPNPEDLKNYWTSLWKKHRDHNDRANWIRDEETRWSHIEEMQFTDITEEDIAIITRQTKNWKAAGIDGVHNFWYKKFSVLHNILARIISDLIKGVVELPQFVTKGITYMLPKNNDTTNPSQYRPITCLPTIYKIITSCITHKINNHVTKHNIIAEEQKGCRQQHRGCKEQLIIDSTVLKHAKVHNRNIHICYIDYKKAFDSVPHSWLIRILQIYKINPTIITFLECIMTEWKTRLILSNSAQSIVIEEISIRNGIFQGDSFSPLWFCLALNPLTHLLNSEKSGYKLTAETQICHLMYMDDIKLFSESEIALNKLIVKTTQYSNDINMSFGFDKCRTLHIHKGKIKNISKDINNSETIFTRMETNDTYKYLGIFQSKTINHTQIKKKLSEEYKRRLNLICKTSLYSKNLFKAINTFAIPVLTYSFGVIKWSQTDINQLEIKTRTTLTKYNNLHPKSAIERMSIKRLKGGRGLVDLKALWEAQISNLRMFFYHKANTSNIHLATVELDNDFTPLNLKNRNISIRSPSSAEADKIDTWRRKELHGRHLHDLEQAHIDLEASNKWLKLGSLFPETEGFMIAIQDQVINTKNYRKYIIKDPHIQNDNCRKCHRQPETIQHIISACPTLTQTDYTHRHNQVTHIIHQKLAIKHKLLPSYTTPYYQYSPKPVLESTRHKMYYDRAILTDKTIHNNRPDITLIDKEDKIVYLIDIAVPNTHNLHRTITDKINKYTELKEEILRIWKMNKVYIVPLVLSSTGVIPKHLLQSLKVIDIPDNTYITMQKASILNTCRIVRKFLLEDNLQHVEHEAHLA

SEQ ID NO: 32960 - protein, 1276 aa, Pyrrhopyge pelota
MRCVLETDKYPRRVPVRENPAPGLQARAAPRILGGGNVSHRTAQSRTVAANSSPSYVTSDLSSSTSTSRNSSRTDSPAEDVSQKASANQPATTKAGKPRVRMKWDYDINLFIMRTYLEVTKLETDRTMYCKKLYDQFKVRYPHLKVSAQRIADQRRVIIRNKLLTDKVIEDLRKDISEQLNQDQALSTITHTPPIHPPVTHNSLSPQSNHLSNQNTLSTNPITEEILSTLTSDASTQTLILHNTHCTANQSLDQTANYTNFNIQNLLHQIDTTLTLYTGTDPTVRPKLPRLKESKKLYQLVDIFNKEILYKYYTIDTDITKLHTLIYCSALVISENLGYKIKRLQQTNTNKNCKANTPAWQIRIENDIKELRASIGRLTQYINNNRSKKILKHVDKIFKATKVHSSHEKDNIRPEEYMDTLKQKLALKSQRLARYKKALQRKNDNSLFSNNEKAFYRTLRNNEPGRYCNLPNPEDLKNYWTSLWKKHRDHNDTANWIRDEETRWSHIEEMQFTDITEEDIAIITRQTKNWKAAGIDGVHNFWYKKFSVLHNILARIISDLIKGVAELPQFVTKGITYMIPKNNDTNNPSQYRPITCLPTIYKIITSCITHKINKHVTKHNIIAEEQKGCRQQHRGCKEQLIIDSTVLKHAKVHNRNIHICYIDYKKAFDSVPHSWLIRILQIYKINPTIITFLECIMTEWKTRLILSNSAQSVVIEEISIRNGIFQGDSFSPLWFCLALNPLTQLLNSEKSGYKLTAETQICHLMYMDDIKLFSESEIALNKLIVKTTQYSNDINMSFGLDKCRTLHIHKGKIKNISKDINNSDTIFTRMETNDTYKYLGIFQSKTINHTQIKKKLSEEYKRRLNLICKTSLYSKNLFKAINTFAIPVLTYSFGVIKWSQTDINQLEIKTRTTLTKHNNLHPKSAIERISIKRLKGGRGLVDLKALWEAQISNLRMFFYHKANTSNIHLATVELDNDFTPLNLKNRNISIRSPSSAEADKIDTWRRKELHGRHLHDLEQTHIDLEASNKWLKLGSLFPETEGFMIAIQDQVINTKNYRKYIIKDPHIQNDNCRKCHRQPETIQHIISACPTLTQTDYTHRHNQVTHIIHQKLAIKHKLLPSYTTPYYKYSPKPVLESTRHKMYYDRAILTDKTIHNNRPDITLIDKEDKIVYLIDIAVPNTHNLHRTITDKINKYTELKEEILRIWKMNKVYIVPLVLSSTGVIPKHLLQSLKVVDIPDNTYITMQKASILNTCRIVRKFLLEDNLQHVEHEAHLA

SEQ ID NO: 32961 - protein, 1175 aa, Pyrrhopyge sergius
MKWDYDINLFIMRTYLEVTKLETDRTMYCKKLYDQFKVRYPHLKVSAQRIADQRRVIIRNKLLTDKVIEDLRKDISEQLNQEQALSTITHTPPIHPPVTHNSLSPQSNHLSNQNTLSTNPITEEILSTLTSDASTQTLILHNTHCTANQNLDQTANYTNFNIQNLLHQIDTTLTLYTGTDPTARPKLPRLKESKKLYQLVDIFNKEILYKYYTIDTDITKLHTLIYCSALVISENLGYKIKRVQQTNTNKNSKANTPAWQIRIENDIKELRASIGRLTQYINNNRSKKILKHVDKIFKATKVHSSHEKDNIRPEEYLDTLKQKLALKSQRLARYKKALQRKNDNSLFSNNEKAFYRTLRNNEPDRYCNLPNPEDLKNYWTSLWKKHRDHNDRANWIRDEETRWSHIEEMQFTDITEEDIAIITRQTKNWKAAGIDGVHNFWYKKFSVLHNILARIISDLIKGVVKLPQFVTKGITYMLPKNNDTTNPSQYRPITCLPTIYKIITSCITHKINKHVTKHNIIAEEQKGCRQQHRGCKEQLIIDSTVLKHAKVHNRNIHICYIDYKKAFDSVPHSWLVRILQIYKINPTIITFLECIINEWKTRLILSNSAQSIVTEEISIRNGIFQGDSFSPLWFCLALNPLTHLLNSEKSGYKLTAETQICHLMYMDDIKLFSESEIALNKLIVKTTQYSNDINMSFGLDKCRTLHIHKGKIKNISKDINNSETIFTRMETNDTYKYLGIFQSKTINHTQIKKKLSEEYKRRLNLICKTSLYSKNLFKAINTFAIPVLTYSFGVIKWSQTDINQLEIKTRTTLTKYNNLHPKSAIERMSIKRLKGGRGLVDLKALWEAQISNLRMFFYHKANTSNIHLATVELDNDFTPLNLKNRNISIRSPSSAEADKIDTWRRKELHGRHLHDLEQAHIDLEASNKWLKLGSLFPETEGFMIAIQDQVINTKNYRKYIIKDPHIQNDNCRKCHRQPETIQHIISACPTLTQTDYTHRHNQVTHIIHQKLAIKHKLLPSYTTPYYQYSPKPVLESTRHKMYYDRAILTDKTIHNNRPDITLIDKEDKIVYLIDIAVPNTHNLHRTITDKINKYTELKEEILRIWKMNKVYIVPLVLSSTGVIPKHLLQSLKVIDIPDNTYITMQKASILNTCRIVRKFFIEDNLQHAEHEAHFA

SEQ ID NO: 32962 - protein, 1274 aa, Pyrrhopyge zenodorus
MRLRNRQIPQAGTREGESRPGPSDSGCPTYSGGGNVSHRTAQSRTVAANSSPSYVTSDLSSTTSTSRNSSRADSPVEDVSQAASANQPATTKAGKPRVRMKWDYDINLFIMRTYLEVTKLETDRTMYCKKLYDQFKVRYPHLKVSAQRIADQRRVIIRNKLLPDKVIEDLRKDISEQLNQEQALSTITHTPPTHPPVTHNSLSPQSNHLSNQNTLSTNPITEEILSTLTSDASTQTLILHNTHCTANQNLDQTANYTNFNIQNLLHQIDTTLTLYTGTDPTARPKLPRLKESKKLYQLVDIFNKEILYKYYTIDTDITKLHTLIYCSALVISENLGYKIRRVQQTNTNKNSKANTPEWQIRIENDIKELRASIGRLTQYINNNRSNKILKHVDKIFKATKVHSSHEKDNIRPEEYLDTLKQKLALKSQRLARYKKALQRKNDNSLFSNNEKAFYRTLRNNEPGRYCNLPNPEDLKNYWTSLWKKHRDHNDRANWIRDEETRWSHIEEMQFTDVTEEDIAITTRQTKNWKAAGIDGVHNFWYKKFSVLHNILARIISDLIKGVVELPEFVTKGITYMLPKNNDTTNPSQYRPITCLPTIYKIITSCITHKINNHVTKHNIIAEEQKGCRQQHRGCKEQLIIDSTVLKHAKVHNRNIHICYIDYKKAFDSVPHSWLIRILQIYKINPTIITFLECIMTEWKTKLILSNSAQSIVIEEISIRNGIFQGDSFSPLWFCLALNPLTHLLNSEKSGYKLTTETQICHLMYMDDIKLFSESEIALNKLIVKTTQYSNDINMSFGLDKCRILHIHKGKIKNISNDINNSETTFTRMETNDTYKYLGIFQSKTINHTQIKKKLSEEYKRRLNLICKTSLYSKNLFKAINTFAIPVLTYSFGIIKWSQTDIKQLEIKTRTTLTKYNNLHPKSAIERMSIKRLKGGRGLVDLKALWEAQISNLRMFFYHKANTSNIHLATVELDNNLTPLNLKNRNISIRSPSSAEAVKIDTWRRKELHGRHLHDLEQAHIDLEASNKWLKLGSLFPETEGFMIAIQDQVINTKNYRKYIIKDPHIQNDNCRKCHRQPETIQHIISACPTLTQTDYTHRHNQVTHIIHQKLAIKHNLLPSFTTPYYQYSPKPVLESTRHKMYYDRAILTDKTIHNNRPDITLIDKEDKIVYLIDIAVPNTHNLHRTITDKINKYTELKEEILRIWKMNKVYIVPMVLSSTGVIPKHLLQSLKVIDIPDNTYITMQTASILNTCRIVRKFLLEDNLQHVEQEAHLA

SEQ ID NO: 32963 - protein, 1275 aa, Pyrrhopyge hadassa
MRLRNRQIPQAGTREGESRPGPSGSGCPTYSGGGGNVSHRTAQSRTVAANSSPSYVTSDLSSSTSTSRNSSRADSPVEDVSQAASANQPATTKAGKPRVRMKWNHDINLFIMRTYLEVTKLETDRTMYCKKLYDQFKVRYPHLKVSAQRIADQRRVIIRNKLLTDKVIEDLRKDISEQLNQEQALSTITHTPPIHPPVTHNSLSPQSNHLSNQNTLSTNPITEEILSTLTSDASIQTLILHNTHCTANQSLDQTANYTNFNIQNLLHQIDTTLTLYMGTDPTARPKLPRLKESKKLYQLVDIFNKEILYKYYTIDTDITKLHTLIYCSALVISENLGYKIKRVQQSNTNKNSKANTPAWQIRIENDIKELRASIGRLTQYINNNRSKKILKHVDKIFKATKVHSSHEKDNIRPEEYLDTLKQKLALKSQRLARYKKALQRKNDNSLFSNNEKAFYRTLRNNEPGRYCNLPNPEDLKNYWTNLWKKHRNHNDRANWFRNEETRWSHIEEMQFTDITEEDIAIITRQTKNWKAAGIDGVHNFWYKKFSVLHNILARIISDLIKGVVELPQFVTKGITYMLPKNNDTTNPSQYRPITCLPTIYKIITSCITHKINKHVTKHNIIAEEQKGCRQQHRGCKEQLIIDSTVLKHAKVHNRNIHICYIDYKKAFDSVPHSWLIRILQIYKINPTIITFLECIMTKWKTRLILSNSAQSIVFEEISIRNGIFQGDSFSPLWFCLALNPLTHLLNSEKSGYKLTAETQICHLMYMDDIKLFSESEIALNKLIVKTTQYSNDINMSFGLDKCRTLHIHKGKIKNISKEINNSETIFTRMETNDTYKYLGIFQSKTINHTQIKKKLSEEYKRRLNLICKTSLYSKNLFKAINTFAIPVLTYSFGVIKWSQTDINQLEIKTRTTLTKYNNLHPKSAIERMSIKRLKGGRGLVDLKALWEAQISNLRMFFYHKANTSNIHLATVELDNDFTPLNLKNRNISIRSPSSAEADKIDTWRRKELHGRHLHDLEQAHIDLEASNKWLKLGSLFPETEGFMIAIQDQVINTKNYRKYIIKDPHIQNDNCRKCHRQPETIQHIISACPTLTQTDYTHRHNQVTHIIHQKLAIKHKLLPSYITPYYQYSPKPVLESTRHKMYYDRAILTDKTIHNNRPDITLIDKEDKIVYLIDIAVPNTHNLHRTITDKINKYTELKEEILRIWKMNKVYIVPLVLSSTGVIPKHLLQSLKVIDIPDNTYITMQKASILNTCRIVRKFLLEDNLQHVEHEAHLA

SEQ ID NO: 32964 - protein, 919 aa, Ennomos fuscantarius
MLTVDCVNNNNNNNNNNNNNTQYTNNNRSKKLVKKVEIIFNNTKVHSSHEKNNIRPEEYLDTLKQKLALKTQRLARYKKALQRKEDNKLFTTNEKGFYRSLRNEATTNNSELPNSVELKKYWTDLWKKQNDHNDRAGWIREEEKRWEHIEEMEFTDISVQDIELVTKTTKNWKAAGIDGVHNFWYKKFCILHDALARITTDLLKGIDELPSFITKGITYMLPKNNDTTNPSQYRPITCLPTIYKIITSCITNKIKYHLTQNNILAEEQKGCRQYHKGCKEQLIIDSTILKHARTHNRNIHISYVDYKKAFDSVPHSWLIRILQIYKINPTIITFLENAMNDWKTRLYLTNSSQSICTDEILIENGIFQGDSLSPLWFCLALNPLSNLHKEKNGYKLTAHTEISHLMYMDDIKLFSKSEKALKTLIQKTTQFSEDINMSFGLDKCKTLHIRKGKIINTNNDADDSSENNFTHMEIDDTYKYLGIHQSITVNHTAIKNKLTQEYTRRLNLICKRPLSSRNLFKAINTYAVPILTYSFGVIKWSRTDINRLEIKTRTTLTKHNYLHPKSAIERMTVKRLKGGRGLIDLKKLWEGQIQNLQKFFHSKSETSKIHLATIETDQNYTPLNLISKSTFTTSLEDPEIEKMNAWRRKEVHGRHLHDLEKTYIDLEASNKWLKLGYLFPETEGFLIAIQDQVINTKNYKKYIIKDPNVQNDRCRKCQRQSETHHIIGACQTLTQTDYTHRHNQVAHIIHQKLAVKHKLIPDNHPPYYQYTPKPILESNNYRMYFDRAILTDKTIHNNRPDITLIDKIKKEVHLIDIAVPNTHNIQKTITEKIQKYTELKEEVHRIWKMKNVYIVPLVLSSTGVIPKHLQHSLKIIGLPENTYINMQKAAILNTCRIVRKFLQEDSVTQPTTEHTAHLV

SEQ ID NO: 32965 - protein, 981 aa, Furcula furcula
MQDVNRTILAPMPQPCSQVSNSSLENLVKCDQCSQARFFRGKRGLNIHIGRAHKSHPAVPVSDPSCSRPVSTANSNVTNLPFWQRISSLKRNVPLIKRIPRGARISVANALSSCIQKILNHNTQCAWEELLTFPYRVLHVTAIKAGEKISLTQKIKLNCSDLNNVISDLSFGISHIRSRVSGNIIHKIETKANDGDFKGAARMLFSSDIIAPNNADTLSALMSKHPSPSVGLHFPDAPPLDQRIVISDTVEIMNCISSFKSGSAGGLDGLTPQHLKDLVSNAVGDAGRSLLSNLTALINLMLAGKVPLEITDVLYGANLCALSKKDGGIRPIAIGSTIRRIASKVCCRRILPTVSQIFQPIQLGFGSKGGCEAAVHAARTFLLQNGGEVLLKVDVKNAFNSVDRAALLTQVQNNIPEIYPYVFQCYGQPSKLLYNEHPICSAVGCQQGDPLGPAIFSLAIHQIICTLNSKFNVWYLDDGTLGGLADSVYDDFEILINEFQKIGLEFNFSKCEIFVLDSVSEARKNLIINKFSILASNIKVLSKESLYLLGAPVLDEAIPSFVDEKIKKFHDSSDRIFKINSHLAFFIIRFCLFVPKFTYFLRCSQLFKFKSHLTILDDLIRCCLTKILNCPFEEDRVWTQATLPIGLGGLGVRKISDLALPAFLSSVYSTETLSRSIIVSALGSVEVTYLSEARNAWLLACPGSDPPILTHSQRQWDKPLCNSIWHSLLTSSVNDLDRARLLAVSAKESGHWLQAMPSSHIGTLLTNTTLSLAVCLRVGARTNLPHRCRCGEYVDKYGHHGLSCSRSAGRMSRHAALNDIIRRGLVTAGVPAILEPVGITRDDGKRPDGVTLIPWQHGKPLVWDATCVDTLAASHTPATCRAAGGAAATASVAKRRKYAALGSSYIFAPFAVETMGPWSHETHALVKEISSKLIEVSGDRRAGSFFCQRISLAIQRGNAASLLGTLPSQCGDNFEEVFYLV

SEQ ID NO: 32966 - protein, 981 aa, Furcula furcula
MQDVNSTILAPMPQPCSQVSNSSLENLVKCDQCSQARFFRGKRGLNIHIGRAHKSHPAVPVSDPSCSRPVSTANSNFINIPFWQRISSLKRNVPLIKRIPRGARISVANALSSCIQKILNHNTQCAWEELLTFPYRVLHVSAIKAGEKISLTQKIKLNCSDLNNVISDLSFGISPIRSRVSGNIIHKIETKANDGDFKGAARMLFSSDIIAPNNADTLSALISKHPSPSVGLHFPNAPPSDQRILISDTVEIMNCISSFKSGSAGGLDGLTPQHLKDLVSNAVGDAGRSLLSNLTALINLMLAGKVPLEITDVLYGANLCALSKKDGGIRPIAIGSTIRRIASKVCCRRILPTVSQIFQPIQLGFGSKGGCEAAVHAARTFLLQNGGEVLLKVDVKNAFNSVDRAALLTQVQNNIPEIYPYVFQCYGQPSKLLYNEHPICSAVGCQQGDPLGPAIFSLAIHQIICTLNSKFNVWYLDDGTLGGSADSVYADFEILINEFQKIGLEFNFSKCEIFVSDSVAEARKNLIINKFSILASNIKVLSKESLYLLGAPILDEAIPSFVDEKIKKFHDSSDRIFKINSHLAFFIMRFCLFVPKFTYFLRCSQLFKFKSHLTTLDDLIRCCLTKILNCPFEEERVWTQATLPICLGGLGVRKISDLALPAFLSSVYSTEILSRSIIVSALGSVEVTYLSEARNAWLLACPGSDPPILTHSQRQWDKPLCNSIWHSLLSSSVNDLDRARLLAVSAKESGHWLQAMPSSHIGTLLTNTTLSLAVCLRVGARTNLPHRCRCGEYVDKYGHHGLSCSRSAGRMSRHAALNDIIRRGLVTAGVPAVLEPVGITRDDGKRPDGVTLIPWQHGKPLVWDATCVDTLAASHTPATCRAAGGAAATASDAKRRKYAALGSSYIFAPFAVETMGPWSHEAHALVKEISSKLIEVSGDRRAGSFLCQRISLAIQRGNAASLLGTLPSQCGDNFEEVFYLV

SEQ ID NO: 32967 - protein, 981 aa, Furcula furcula
MQDVNRTILAPMPQPCSQVSNSSLENLVKCDQCSQARFFRGKRGLNIHIGRAHKSHPAVPVSDPSCSRPVSTANSNVTNLPFWQRISSLKRNVPLIKRIPRGARISVANALSSCIQKNLNHNTQCAWEELLTFPYRVLHVTAIKAGEKISLTQKIKLNCSDLNNVISDLSFGISPIRSRVSGNIIHKIETKANDGDFKGAARMLFSSDIIAPNNADTLSALMSKHPSPSVGLHFPDAPPLDQRILISDTVEIMNCISSFKSGSAGGLDGLTPQHLKDLVSNAVGDAGRSLLSNLTALINLMLAGKVPLEITDVLYGANLCALSKKDGGIRPIAIGSTIRRIASKVCCRRILPTVSQIFQPIQLGFGSKGGCEAAVHAARTFLLQNGGEVLLKVDVKNAFNSVDRAALLTQVQNNIPEIYPYVFQCYGQPSKLLYNEHPICSAVGCQQGDPLGPAIFSLAIHQIICTLNSKFNVWYLDDGTLGGSADSVYDDFEILINEFQKIGLEFNFSKCEIFVLDSVSEARKNLIINKFSILASNIKVLSKESLYLLGAPVLDEAIPSFVDEKIKKFHDSSDRIFKINSHLVFFIIRFCLFVPKFTYFLRCSQLFKFKSHLTTLDDLIRCCLTKNLNCPFEEDRVWTQATLPIGLGGLGVRKISDLALPAFLSSVYSTETLSRSIIVSALGSVEVTYLSEARNAWLLACPGSDPPILTHSQRQRDKPLCNSIWHSLLTSSVNDLDRARLLAVSAKESGHWLQAMPSSHIGTLLTNTTLSLAVCLRVGARTNLPHRCRCGEYVDKYGHHGLSCSRSAGRMSRHAALNDIIRRGLVTAGVPAVLEPVGITRDDGKRPDGVTLIPWQHGKPLVWDATCVDTLAASHTPATCRAAGGAAATASVAKRRKYAALGSSYIFAPFAVETMGPWSHETHALVKEISSKLIEVSGDRRAGSFFCQRISLAIQRGNAASLLGTLPSQCGDNFEEVFYLV

SEQ ID NO: 32968 - protein, 980 aa, Furcula furcula
MQDVNRTILAPMPQPHSQVSNSSLENLVKCDQCSQARFFRGKRGLNIHIGRAHKSHPAVPVSDPSCSRPVSTANSNFTNIPFWQRISSLKRNVPLIKRIPRGARISVANALSSCIQKILNHNTQCAWEELLTFPYRVLHVTAIKAGEKISLTQKIKLNCSDLNNVISDLSFGISPIRSRVSGNIIHKIETKANDGDFKGAARMLFSSDIIAPNNADTLSALISKHPSPSVGLNFPNAPPSDQRILISDTVEIMNCISSFKSGSAGGLDGLTPQHLKDLVSNAVGDAGRSLLSNLTALINLMLAGKVPLEITDVLYGANLCALSKKDGGIRPIAIGSTIRRIASKVCCRRILPTVSQIFQPIQLGFGSKGGCEAAVHAARTFLLQNGGEVLLKVDVKNAFNSVDRAALLTQVQNNIPEIYPYVFQCYGQPSKLLYNEHPICSAVGCQQGDPLGPAIFSLAIHQIICTLNSKFNVWYLDDGTLGGSADSVYADFEILINEFQKIGLEFNFSKCEIFVSDSVAEARKNLIINKFCILASNIKVLSKESLYLLGAPILDEAIPSFVDEKIKKFHDSSDRIFKINSHLAFFIMRFCLFVPKFTYFLRCSQLFKFKSHLTTLDDLIRCSLTKILNCPFEEERVWTQATLPICLGGLGIRKISDLALPAFLSSVYSTEILSRSIIVSALGSVEVTYLSEARNAWLLACPGSDPPILTHFQRQWDKPLCNSIWHSLLSSSVNDLDRARLLAVSAKESGHWLQAMRSSHIGTLLTNTTLNLAVCLRVGARTNLPHRCRCGEYVDKYGHHGLSCSRSAGRMSRHAALNYIIRRGLVTAGVPAVLEPVGITRDDGKRPDGVTLIPWQHGKPLVWDATCVDTLAASHTPATCRAAGGAAATASDAKRRKYAALGSSYIFAPFAVETMGPWSHETHALVKEISSKLIEVSGDRRAGSFCQRISLAIQRGNAASLLGTLPSQCGDNFEEVFYLV

SEQ ID NO: 32969 - protein, 981 aa, Furcula furcula
MQDVNSTILAPMPQPCSQVSNSSLENLVKCDQCSQARFFRGKRGLNIHIGRAHKSHPVVPVSDPSCSRPVSTANSNFTNIPFWQRISSLKRNVPLIKRIPRGARISVANALSSCIQKILNHNTQCAWEELLTFPYRVLHVSAIKAGEKISLTQKIKLNCSDLNNVISDLSFGISPIRSRVSGNIIHKIETKANDGDFKGAARMLFSSDIIAPNNADTLSALISKHPSPSVGLHFPNAPPSDERILISDTVEIMNCISSFKSGSAGGLDGLTPQHLKDLVSNAVGDAGRSLLSNLTALINLMLAGKVPLEITDVLYGANLCALSKKDGGIRPIAIGSTIRRIASKVCCRRILPTVSQIFQPIQLGFGSKGGCEAAVHAARTFLLQNGGEVLLKVDVKNAFNSVDRAALLTQVQNNIPEIYPYVFQCYGQPSKLLYNEHPICSAVGCQQGDPLGPAIFSLAIHQIICTLNSKFNVWYLDDGTLGGSADSVYADFEILINEFQKIGLEFNFSKCEIFVSDSVAEARKNLIINKFSILASNIKVLSKESLYLLGAPILDEAIPSFVDEKIKKFHDSSDRIFKINSHLAFFIMRFCLFVPKFTYFLRCSQLFKFKSHLTTLDDLIRCCLTKILNCPFEEERVWTQATLPICLGGLGVRKISDLALPAFLSSVYSTEILSRSIIVSALGSVEVTYLSEARNAWLLACPGSDPPILTHSQRQWDKPLCNSIWHSLLSSSVNDLDRARLLAVSAKESGHWLQAMPSSHIGTLLTNTTLSLAVCLRVGARTNLPHRCRCGEYVDKYGHHGLSCSRSAGRMSRHAALNDIIRRGLVTAGVPAVLEPVGITRDDGKRPDGVTLIPWQHGKPLVWDATCVDTLAASHTPATCRAAGGAAASASDAKRRKYAALGSSYIFAPFAVETMGPWSHETHTLVKEISSKLIEVSGDRRAGSFFCQRISLAIQRGNAASLLGTLPSQCGDNFEEVFYLV

SEQ ID NO: 32970 - protein, 977 aa, Furcula furcula
MQDVNRTILAPMPQPCSQVSNSALENLVKCDQCSQARFFRGKRGLNIHIGRAHKSHPAVPVSDPSCSRPVSTVTNLPFWQRISSLKRNVPLIKRIPRGARISVANALSSCIQKILNHNTQCAWEELLTFPYRVLHVTAIKAGEKISLTQKIKLNCSDLNNVISDLSFGISPIRSRVSGNIIHKIETKANDGDFKGAARMLFSSDIIAPNNADTLSALMSKHPSPSVGLHFPDAPPLDQRILISDTVEIMNCISSFKSGSAGGLDGLTPQHLKDLVSNAVGDAGRSLLSNLTALINLMLAGKVPLEITDVLYGANLCALSKKDGGIRPIAIGSTIRRIASKVCCRRILPTVSQIFQPIQLGFGSKGGCEAAVHAARTFLLQNGGEVLLKVDVKNAFNSVDRAALLTQVQNNIPEIYPYVFQCYGQPSKLLYNEHPICSAVGCQQGDPLGPAIFSLAIHQIICTLNSKFNVWYLDDGTLGGSADSVYDDFEILINEFQKIGLEFNFSKCEIFVLDSVSEARKNLIINKFSILASNIKVLSKESLYLLGAPVLDEAIPSFVDEKIKKFHDSSDRIFKINSHLAFFIIRFCLFVPKFTYFLRCSQLFKFKSHLTILDDLIRCCLTKILNCPFEEDRVWTQATLPIGLGGLGVRKISDLALPAFLSSVYSTETLSRSIIVSALGSVEVTYLSEARNAWLLACPGSDPPILTHSQRQWDKPLCNSIWHSLLTSSVNDLDRARLLAVSAKESGHWLQAMPSSHIGTLLTNTTLSLAVCLRVGARTNLPHRCRCGEYVDKYGHHGLSCSRSAGRMSRHAALNDIIRRGLVTAGVPAVLEPVGITRDDGKRPDGVTLIPWQHGKPLVWDATCVDTLAASHTPATCRAAGGAAATASVAKRRKYAALGSSYIFAPFAVETMGPWSHETHALVKEISSKLIEVSGDRRAGSFFCQRISLAIQRGNAASLLGTLPSQCGDNFEEVFYLV

SEQ ID NO: 32971 - protein, 981 aa, Furcula furcula
MQDVNSTILAPMPQPCSQVSNSSLENLVKCDQCSQARFFRGKRGLNIHIGRAHKSHPAVPVSDPSCSRPVSTANSNFTNIPFWQRISSLKRNVPLIKRIPRGARMSVANALSSCIQKILNHNTQCAWEELLTFPYRVLHVSAIKAGEKISLTQKIKLNCSDLNNVISDLSFGISPIRSRVSGNIIHKIETKANDGDFKGAARMLFSSDIIAPNNADTLSALISKHPSPSVGLHFPNAPPSDQRILISDTVEIMNCISSFKSGSAGGLDGLTPQHLKDLVSNAVGDAGRSLLSNLTALINLMLAGKVPLEITDVLYGANLCALSKKDGGIRPIAIGSTIRRIASKVCCRRILPTVSQIFQPIQLGFGSKGGCEAAVHAARTFLLQNGGEVLLKVDVKNAFNSVDRAALLTQVQNNIPEIYPYVFQCYGQPSKLLYNEHPICSAVGCQQGDPLGPAIYSLAIHQIICTLNSKFNVWYLDDGTLGGSADSVYADFEILINEFQKIGLEFNFSKCEIFVSDSVAEARKNLIINKFSILASNIKVLSKESLYLLGAPILDEAIPSFVDEKIKKFHDSSDRIFKINSHLAFFIMRFCLFVPKFTYFLRCSQLFKFKSHLTTLDDLIRFCLTKILNCPFEEERVWTQATLPICLGGLGVRKISDLALPAFLSSVYSTEILSRSIIVSALGSVEVTYLSEARNAWLLACPGSDPPILTHSQRQWDKPLCNSIWHSLLSSSVNDLDRARLLAVSAKESGHWLQAMPSSHIGTLLTNTTLSLAVCLRVGARTNLPHRCRCGEYVDKYGHHGLSCSRSAGRMSRHAALNDIIRRGLVTAGVPAVLEPVGITRDDGKRPDGVTLIPWQHGKPLVWDATCVDTLAASHTPATCRAAGGAAATASDAKRRKYAALGSSYIFAPFAVETMGPWSHETHTLVKEISSKLIEVSGDRRAGSFFCQRISLAIQRGNAASLLGTLPSQCGDNFEEVFYLV

SEQ ID NO: 32972 - protein, 925 aa, Furcula furcula
MIPEVLSCYACVRTILFSPGFDCKFECHKPSILAARSLKRNVPLIKRIPCGARISVANALSSCIQKILNHNTQCAWEELLTFPYRVLHVTAIKAGEKISLTQKIKLKCSDLNNVISDLSFGISPIRSRVSGNIIHKIETKANDGDFKGAARMLFSSDIITPNNADTLSALMSKHPSPSVGLHFPDAPPLDQRILISDTVKIMNCISSFKSGSAGGLDGLTPQHLKDLVSNAVGDAGRSLLSNLTALINLMLAGKVPLEITDVLYGANLCALSKKDGGIRPIAIGSTIRRTASKVCCRRILPTVSQIFQPIQLGFGSKGGCEAAVHAARTFLLQNGGEVLLKVDVKNAFNSVDRAALLTQVQNNIPEIYPYVFQCYGQPSKLLFNEHPICSAVGCQQGDPLGPAIFSLAIHQIICTLNSKFNVWYLDDGTLGGSADSVYDDFEILINEFQKVGLEFNFSKCEIFVLDSVSEARKNLIINKFSILVSNIKVLSKESLYLLGAPVLGEAIPSFVDEKNKKLHVSSDRIFKINSHLAFFIMPFCLFVPKFTYFLRCSQLFKFKSHLITLDDLIRCCLTKILNCPFEEDRVWTQATLPFGLGGLGVRKISDLALPAFLSSVYSTETLSRSIIVSALGFVEVTYLSEARNAWLLACPGSDPPILTHSQRQWDKPLCNSIWHSLLTSSVNDLDRARLLAVSANESGHWLQAMPSSHIGTLLTNTTLSLAVWLRVGARTNLPHRCRCGEYVDKYGHHGLSCSRSAGRMSRHAALNDIIRRGLVTAGVPAVLEPVGITRDDGKRPDGVTLIPWQHGKPLVWDATCVDILAACHTPATCRAAGGAAATARVAKRRKYAALGSSYIFAPFAVETMGPWSHETHALVKEISSKLIEVAGSFFCQRISLAIQRGNAASLLGTLPSQCGDNFEEVFYLV

SEQ ID NO: 32973 - protein, 981 aa, Furcula furcula
MQDVNRTILAPMPQPCSQVSNSSLENLVKCDQCSQARFFRGKRGLNIHIGRAHKSHPAVPVSDPSCSRPVSTANSNFTNIPFWQRISSLKRNVPLIKRIPRGARISVANALSSCIQKILNHNTQCAWEELLTFPYRVLHVTAIKAGEKISLTQKIKLNCSDLNNVISDLSFGISPIRSRVSGNIIHKIETKANDGDFKGAARMLFSSDIIAPNNADTLSALISKHPSPSVGLHFPNAPPSDQRILISDTVEIMNCISSFKSGSAGGLDGLTPQHLKDLVSNAVGDAGRSLLSNLTALINLMLAGKVPLEITDVLYGANLCALSKKDGGIRPIAIGSTIRRIASKVCCRRILPTVSQIFQPIQLGFGSKGGCEAAVHAARTFLLQNGGEVLLKVDVKNAFNSVDRAALLTQVQNNIPEIYPYVFQCYGQPSKLLYNEHPICSAVGCQQGDPLGPAIFSLAIHQIICTLNSKFNVWYLDGGTLGGSADSVYADFEILINEFQKIGLEFNFSKCEIFVSDSVAEARKNLIINKFSILASNIKVLSKESLYLLGAPILDEAIPSFVDEKIKKFHDSSDRIFKINSHLAFFIMRFCLFVPKFTYFLRCSQLFKFKSHLTTLDDLIRCCLTKILNCPFEEERVWTQATLPICLGGLGVRKISDLALPAFLSSVYSTEILSRSIIVSALGSVEVTYLSEARNAWLLACPGSDPPILTHSQRQWDKPLCNSIWHSLLSSSVNDLDRARLLAVSAKESGHWLQAMPSSHIGTLLTNTTLSLAVCLRVGARTNLPHRCRCGEYVDKYGHHGLSCSRSAGRMSRHAALNDIIRRGLVTAGVPAVLEPVGITRDDGKRPDGVTLIPWQHGKPLVWDATCVDTLAASHTPATCRAAGGAAAAASDAKRRKYAALGSSYIFAPFAVETMGPWSHETHALVKEISSKLIEVSGDRRAGSFFCQRISLAIQRGNAASLLGTLPSQCGDNFEEVFYLV

SEQ ID NO: 32974 - protein, 981 aa, Furcula furcula
MQDVNRTILAPMPQPCSQVSNSSLENLVKCDQCSQARFFRGKRGLNIHIGRAHKSHPAVPVSDPSCSRPVSTTNSNVTNLPFWQRISSLKRNVPLIKRIPRGARISVANALSSCIQKILNHNTQCAWEELLTFPYRVLHVTAIKAGEKISLTQKIKLNCSDLNNVISDLSFGISPIRSRVSGNIIHKIETKANDGDFKGAARMLFSSDIIAPNNADTLSALMSKHPSPSVGLHFPDAPPLDQRILISDTVEIMNCISSFKSGSAGGLDGLTPQHLKDLVSNAVGDAGRSLLSNLTALINLMLAGKVPLEITDVLYGANLCALSKKDGGIRPIAIGSTIRRIASKVCCRRILPTVSQIFQPIQLGFGSKGGCEAAVHAARTFLLQNGGEVLLKVDVKNAFNSVDRAALLTQVHNNIPEIYPYVFQCYGQPSKLLYNEHPICSAVGCQQGDPLGPAIFSLAIHQIICTLNSKFNVWYLDDGTLGGSADSVYDDFEILINEFQKIGLEFNFSKCEIFVLDSVPEARKNLIINKFSSLASNIKVLSKESLYLLGAPVLDEAIPSFVDEKIKKFHDSSDRIFKINSHLAFFIIRFCLFVPKFTYFLRCSQLFKFKSHLTSLDDLIRCCLTKILNCPFEEDRVWTQATLPIGLGGLGVRKISDLALPAFLSSVYSTETLSRSIIVSALGSVEVTYLSEARNAWLLACPGSDPPILTHSQRQWDKPLCNSIWHSLLTSSVNDLDRARLLAVSAKESGHWLQAMPSSHIGTLLTNTTLSLAVCLRVGARTNLPHRCRCGEYVDKYGHHGLSCSRSAGRMSRHAALNDIIRRGLVTAGVPAVLEPVGITRDDGKRPDGVTLIPWQHGKPLVWDATCVDTLAASHTPATCRAAGGAAAAASVAKRRKYAALGSSYIFAPFAVETMGPWSHETHALVKEISSKLIEVSGDRRAGSFFCQRISLAIQRGNAASLLGTLPSQCGDNFEEVFYLV

SEQ ID NO: 32975 - protein, 981 aa, Furcula furcula
MQDVNRTILAPMPQPCSQVSNSALENLVKCDQCSQARFFRGKRGLNIHIGRAHKSHPAVPVSDPSCSRPVSTANSNVTNLPFWQRISSLKRNVPLIKRIPRGARISVANALSSCIQKILNHNTQCAWEELLTFPYRVLHVTAIKAGEKISLTQKIKLNCSDLNNVISDLSFGISPIRSRVSGNIIHKIETKANDGDFKGAARMLFSSDIIAPNNADTLSALMSKHPSPSVGLHFPDAPPLDQRILISDTVEIMNCISSFKSGSAGGLDGLTPQHLKDLVSNAVGDAGRSFLSNLTALINLMLAGKVPLEITDVLYGANLCALSKKDGGIRPIAIGSTIRRIASKVCCRRILPTVSQIFQPIQLGFGSKGGCEAAVHAARTFLLQNGGEVLLKVDVKNAFNSVDRAALLTQVQNNIPEIYPYVFQCYGQPSKLLYNEHPICSAVGCQQGDPLGPAIFSLAIHQIICTLNSKFNVWYLDDGTLGGSADSVYDDFEILINEFQKIGLEFNFSKCEIFVLDSVSEARKNLIINKFSILASNIKVLSKESLYLLGAPVLDEAIPSFVDEKIKKFHDSSDRIFKINSHLAFFIIRFCLFVLKFTYFLRCSQLFKFKSHLTILDDLIRCCLTKILNCPFEEDRVWTQATLPIGLGGLGVRKISDLALPAFLSSVYSTETLSRSIIVSALGSVEVTYLSEARNAWLLACPGSDPPILTHFQRQWDKPLCNSIWHSLLTSSVNDLDRARLLAVSAKESGHWLQAMPSSHIGTLLTNTTLSLAVCLRVGARTNLPHRCRCGEYVDKYGHHGLSCSRSAGRMSRHAALNDIIRRGLVTAGVPAVLEPVGITRDDGKRPDGVTLIPWQHGKPLVWDATCVDTLAASHTPATCRAAGGAAATASVAKRRKYAALGSSYIFAPFAVETMGPWSHETHALVKEISSKLIEVSGDRRAGSFFCQRISLAIQRGNAASLLGTLPSQCGDNFEEVFYLV

SEQ ID NO: 32976 - protein, 981 aa, Furcula furcula
MQDVNSTILAPMPQPCSQVSNSSLENLVKCDQCSQARFFRGKRGLNIHIGRAHKSHPAVPVSDPSCSRPVSTANSNFINIPFWQRISSLKRNVPLIKRIPRGARISVANALSSCIQKILNHNTQCAWEELLTFPYRVLHVSAIKAGEKISLTQKIKLNCSDLNNVISDLSFGISPIRSRVSGNIIHKNETKANDGDFKGAARMLFSSDIIAPNNADTLSALISKHPSPSVGLHFPNAPPSDQRILISDTVEIMNCISSFKSGSAGGLDGLTPQHLKDLVSNAVGDAGRSLLSNLTALINLMLAGKVPLEITDVLYGANLCALSKKDGGIRPIAIGSTIRRIASKVCCRRILPTVSQIFQPIQLGFGSKGGCEAAVHAARTFLLQNGGEVLLKVDVKNAFNSVDRAALLTQVQNNIPEIYPYVFQCYGQPSKLLYNEHPICSAVGCQQGDPLGPAIFSLAIHQIICTLNSKFNVWYLDDGTLGGSADSVYADFEILINEFQKIGLEFNFSKCEIFVSDSVAEARKNLIINKFSILASNIKVLSKESLYLLGAPILDEAIPSFVDEKIKKFHDSSDRIFKINSHLAFFIMRFCLFVPKFTYFLRCSQLFKFKSHLTTLDDLIRCCLTKILNCPFEEERVWTQATLPICLGGLGVRKISDLALPAFLSSVYSTEILSRSIIVSALGSVEVTYLSEARNAWLLACPGSDPPILTHSQRQWDKPLCNSIWHSLLSSSVNDLDRARLLAVSAKESGHWLQAMPSSHIGTLLTNTTLSLAVCLRVGARTNLPHRCRCGEYVDKYGHHGLSCSRSAGRMSRHAALNDIIRRGLVTAGVPAVLEPVGITRDDGKRPDGVTLIPWQHGKPLVWDATCVDTLAASHTPATCRAAGGAAATASDAKRRKYAALGSSYIFAPFAVETMGPWSHEAHALVKEISSKLIEVSGDRRAGSFLCQRISLAIQRGNAASLLGTLPSQCGDNFEEVFYLV

SEQ ID NO: 32977 - protein, 981 aa, Furcula furcula
MQDVNSTILAPMPQPCSQVSNSSLENLVKCDQCSQARFFRGKRGLNIHIGRAHKSHPAVPVSDPSCSRPVSTANSNFINIPLWQRISSLKRNVPLIKRIPRGARISVANALSSCIQKILNHNTQCAWEELLTFPYRVLHVSAIKAGEKISLTQKIKLNCSDLNNVISDLSFGISPIRSRVSGNIIHKIETKANDGDFKGAARMLFSSDIIAPNNADTLSALISKHPSPSVGLHFPNAPPSDQRILISDTVEIMNCISSFKSGSAGGLDGLTPQHLKDLVSNAVGDAGRSLLSNLTALINLMLAGKVPLEITDVLYGANLCALSKKDGGIRPIAIGSTIRRIASKVCCRRILPTVSQIFQPIQLGFGSKGGCEAAVHAARTFLLQNGGEVLLKVDVKNAFNSVDRAALLTQVQNNIPEIYPYVFQCYGQPSKLLYNEHPICSAVGCQQGDPLGPAIFSLAIHQIICTLNSKFNVWYLDDGTFGGSADSVYADFEILINEFQKIGLEFNFSKCEIFVSDSVAEARKNLIINKFSILASNIKVLSKESLYLLGAPILDEAIPSFVDEKIKKFHDSSDRIFKINSHLAFFIMRFCLFVPKFTYFLRCSQLFKFKSHLTTLDDLIRCCLTKILNCPFEEERVWTQATLPICLGGLGVRKISDLALPAFLSSVYSTEILSRSIIVSALGSVEVTYLSEARNAWLLACPGSDPPILTHSQRQWDKPLCNSIWHSLLSSSVNDLDRARLLAVSAKESGHWLQAMPSSHIGTLLTNTTLSLAVCLRVGARTNLPHRCRCGEYVDKYGHHGLSCSRSAGRMSRHAALNDIIRRGLVTAGVPAVLEPVGITRDDGKRPDGVTLIPWQHGKPLVWDATCVDTFAASHTPATCRAAGGAAATASDAKRRKYAALGSSYIFAPFAVETMGPWSHETHALVKEISSKLIEVSGDRRAGSFLCQRISLAIQRGNAASLLGTLPSQCGDNFEEVFYLV

SEQ ID NO: 32978 - protein, 981 aa, Furcula furcula
MQDVNRTILAPMPQPCSQVSNSSLENLVKCDQCSQARFFRGKRGLNIHTRRAHKSHPAVPVSDPSCSRPVSTANSNVTNLPFWQRISSLKRNVPLIKRIPRGARISVANALSSCIQKILNHNTQCAWEELLTFPYRVLHVTAIKAGEKNSLTQKIKLNCSDLNNVISDLSFGISPIRSRVSGNIIHKIETKANDGDFKGAARMLFSSDIIAPNNADTLSALMSKHPSPSVGLHFPDAPPLDQRILISDTVEIMNCISSFKSGSAGGLDGLTPQHLKDLVSNAVGDAGRSLLSNLTALINLMLAGKVPLEITDVLYGANLCALSKKDGGIRPIAIGSTIRRIASKDCCRRILPTVSQIFQPIQLGFGSKGGCEAAVHAARTFLLQNGGEVLLKVDVKNAFNSVDRAALLTQVQNNIPEIYPYVFQCYGQPSQLLYNEHPICSAVGCQQGDPLGPAIFSLAIHQIICTLNSKFNVWYLDDGTLGGSADSVYDDFEILINEFQKIGLEFNFSKCEIFVLDSVSEARKNLIINKFSILASNIKVLSKESLYLLGAPVLDEAIPSFVDEKIKKFHDSSDRIFKINSHLAFFIIRFCLFVPKFTYFLRCSQLFKFKSHLTTSDDLIRCCLTKILNCPFEEDRVWTQATLPIGLGGLGVRKISDLALPAFLSSVYSTETLSRSIIVSALGSVEVTYLSEARNAWLLACPGSGPPILTHSQRQWDKPLCNSIWHSLLTSSVNDLDRARLLAVSAKESGHWLQAMPSSHIGTLLTNTTLSLAVCLRVGARTNLPHRCRCGEYVDKYGHHGLSCSRSAGRMSRHAALNDIIRRGLVTAGVPAVLEPVGITRDDGKRPDGVTLIPWQHGKPLVWDATCVDTLAASHTPATCRAAGGAAAAASVAKRRKYAALGSSYIFAPFAVETMGPWSHETHALVKEISSKLIEVSGDRRAGSFFCQRISLAIQRGNAASLLGTLPSQCGDNFEEVFYLV

SEQ ID NO: 32979 - protein, 981 aa, Furcula furcula
MQDVNRTILAPMPQPCSQVSNSSLENLVKCDQCSQARFFRGKRGLNIHIGRAHKSHPAVPVSDPSCSRPVSTTNSNVTNLPFWQRISSLKRNVPLIKRIPRGARISVANALSSCIQKILNHNTQCAWEELLTFPYRVLHVTAIKAGEKISLTQKIKLNCSDLNNVISDLSFGISPIRSRVSGNIIHKIETKANDGDFKGAARMLFSSDIIAPNNADTLSALMSKHPSPSVGLHFPDAPPLDQRILISDTVEIMNCISSFKSGSAGGLDGLTPQHLKDLVSNAVGDAGRSLLSNLTALINLMLAGKVPLEITDVLYGANLCALSKKDGGIRPIAIGSTIRRIASKVCCRRILPTVSQIFQPIQLGFGSKGGCEAAVHAARTFLLQNGGEVLLKVDVKNAFNSVDRAALLTQVQNNIPEIYPYVFQCYGQPSKLLYNEHPICSAVGCQQGDPLGPAIFSLAIHQIICTLNSKFNVWYLDDGTLGGSADSVYDDFEILINEFQKIGLEFNFSKCEIFVLDSVPEARKNLIINKFSSLASNIKVLSKESLYLLGAPVLDEAIPSFVDEKIKKFHDSSDRIFKINSHLAFFIIRFCLFVPKFTYFLRCSQLFKFKSHLTSLDDLIRCCLTKILNCPFEEDRVWTQATLPIGLGGLGVRKISDLALPAFLSSVYSTETLSRSIIVSALGSVEVTYLSEARNAWLLACPGSNPPILTHSQRQWDKPLCNSIWHSLLTSSVNDLDRARLLAVSAKESGHWLQAMPSSHIGTLLTNTTLSLAVCLRVGARTNLPHRCRCGEYVDKYGHHGLSCSRSAGRMSRHAALNDIIRRGLVTAGVPAVLEPVGITRDDGKRPDGVTLIPWQHGKPLVWDATCVDTLAASHTPATCRAAGGAAAAASVAKRRKYAALGSSYIFAPFAVETMGPWSHETHALVKEISSKLIEVSGDRRAGSFFCQRISLAIQRGNAASLLGTLPSQCGDNFEEVFYLV

SEQ ID NO: 32980 - protein, 981 aa, Furcula furcula
MQDVNRTILAPMPQPCSQVSNSSLENLVKCDQCSQARFFRGKRGLNIHIGRAHKSHPAVPVSDPSCSRPVSTTNSNVTNLPFWQRISSLKRNVPLIKRIPRGARISVANALSSCIQKILNHNTQCAWEELLTFPYRVLHVTAIKAGEKISLTQNIKLNCSDLNNVISDLSFGISPIRSRVSGNIIHKIETKANDGDFKGAARMLFSSDIIAPNNADTLSALMSKHPSPSVGLHFPDAPPLDQRILISDTVEIMNCISSFKSGSAGGLDGLTPQHLKDLVSNAVGDAGRSLLSNLTALINLMLAGKVPLEITDVLYGANLCALSKKDGGIRPIAIGSTIRRIASKVCCRRILPTVSQIFQPIQLGFGSKGGCEAAVHAARTFLLQNGGEVLLKVDVKNAFNSVDRAALLTQVQNNIPEIYPYVFQCYGQPSKLLYNEHPICSAVGCQQGDPLGPAIFSLAIHQIICTLNSKFNVWYLDDGTLGGSADSVYDDFEILINEFQKIGLEFNFSKCEIFVLDSVPEARKNLIINKFSSLASNIKVLSKESLYLLGAPVLDEAIPSFVDEKIKKFHDSSDRIFKINSHLAFFIIRFCLFVPKFTYFLRCSQLFKFKSHLTSLDDLIRCCLTKILNCPFEEDRVWTQATLPIGLGGLGVRKISDLALPAFLSSVYSTETLSRSIIVSALGSVEVTYLSEARNAWLLACPGSDPPILTHSQRQWDKPLCNSIWHSLLTSSVNDLDRARLLAVSAKESGHWLQAMPSSHIGTLLTNTTLSLAVCLRVGARTNLPHRCRCGEYVDKYGHHGLSCSRSAGRMSRHAALNDIIRRGLVTAGVPAVLEPVGITRDDGKRPDGVTLIPWQHGKPLVWDATCVDTLAASHTPATCRAAGGAAAAASVAKRRKYAALGSSYIFAPFAVETMGPWSHETHALVKEISSKLIEVSGDRRAGSFFCQRISLAIQRGNAASLLGTLPSQCGDNFEEVFYLV

SEQ ID NO: 32981 - protein, 981 aa, Furcula furcula
MQDVNRTILAPMPQPCSQVSNSSLENLVKCDQCSQARFFRGKRGLNIHIGRAHKSHPAVPVSEPSCSRPVSTTNSNVTNLPFWQRISSLKRNVPLIKRIPRGARISVANALSSCIQKILNHNTQCAWEELLTFPYRVLHVTAIKAGEKISLTQKIKLNCSDLNNVISDLSFGISPIRSRVSGNIIHKIETKANDGDFKGAARMLFSSDIIAPNNADTLSALMSKHPSPSVGLHFPDAPPLDQRILISDTVEIMNCISSFKSGSAGGLDGLTPQHLKDLVSNAVGDAGRSLLSNLTALINLMLAGKVPLEITDVLYGANLCALSKKDGGIRPIAIGSTIRRIASKVCCRRILPTVSQIFQPIQLGFGSKGGCEAAVHAARTFLLQNGGEVLLKVDVKNAFNSVDRAALLTQVQNNIPEIYPYVFQCYGQPSKLLYNEHPICSAVGCQQGDPLGPAIFSLAIHQIICTLNSKFNVWYLDDGTLGGSADSVYDDFEILINEFQKIGLEFNFSKCEIFVLDSVPEARKNLIINKFSSLASNIKVLSKESLYLLGAPVLNEAIPSFVDEKIKKFHDSSDRIFKINSHLAFFIIRFCLFVPKFTYFLRCSQLFKFKSHLTSLDDLIRCCLTKILNCPFEEDRVWTQATLPIGLGGLGVRKISDLALPAFLSSVYSTETLSRSIIVSALGSVEVTYLSEARNAWLLACPGSDPPILTHSQRQWDKPLCNSIWHSLLTSSVNDLDRARLLAVSAKESGHWLQAMPSSHIGTLLTNTTLSLAVCLRVGARTNLPHRCRCGEYVDKYGHHGLSCSRSAGRMSRHAALNDIIRRGLVTAGVPAVLEPVGITRDDGKRPDGVTLIPWQHGKPLVWDATCVDTLAASHTPATCRAAGGAAAAASVAKRRKYAALGSSYIFAPFAVETMGPWSHETHALVKEISSKLIEVSGDRRAGSFFCQRISLAIQRGNAASLLGTLPSQCGDNFEEVFYLV

SEQ ID NO: 32982 - protein, 981 aa, Furcula furcula
MQDVNSTILAPMPQPCSQVSNSSLENLVKCDQCSQARFFRGKRGLNIHIGRAHKSHPAVPVSDPSCSRPVSTANSNFTNIPFWQRISSLKRNVPLIKRIPRGARISVANALSSCIQKILNHNTQCAWEELLTFPYRVLHVSAIKAGEKISLTQKIKLNCSDLNNVISDLSFGISPIRSRVSGNIIHKIETKANDGDFKGAARMLFSSDIIAPNNADTLSALISKHPSPSVGLHFPNAPPSDQRILISDTVEIMNCISSFKSGSAGGLDGLTPQHLKDLVSNAVGDAGRSLLSNLTALINLMLAGKVPLEITDVLYGANLCALSKKDGGIRPIAIGSTIRRIASKVCCRRILPTVSQIFQPIQLGFGSKGGCEAAVHAARTFLLQNGGEVLLKVDVKNAFNSVDRAALLTQVQNNIPEIYPYVFQCYGQPSKLLYNEHPICSVVGCQQGDPLGPAIFSLAIHQIICTLNSKFNVWYLDDGTLGGSADSVYADFEILINEFQKIGLEFNFSKCEIFVSDSVAEARKNLIINKFSILASNIKVLSKESLYLLGAPILDEAIPSFVDEKIKKFHDSSDRIFKINSHLAFFIMRFCLFVPKFTYFLRCSQLFKFKSHLTTLDDLIRCCLTKILNCPFEEERVWTQATLPICLGGLGVRKISDLALPAFLSSVYSTEILSRSIIVSALGSVEVTYLSEARNAWLLACPGSDPPILTHSQRQWDKPLCNSIWHSLLSSSVNDLDRARLLAVSAKESGHWLQAMPSSHIGTLLTNTTLSLAVCLRVGARTNLPHRCRCGEYVDKYGHHGLSCSRSAGRMSRHAALNDIIRRGLVTAGVPAVLEPVGITRDDGKRPDGVTLIPWQHGKPLVWDATCVDTLAASHTPATCRAAGGAAATASDAKRRKYAALGSSYIFAPFAVETMGPWSHETHTLVKEISSKLIEVSGDRRAGSFFCQRISLAIQRGNAASLLGTLPSQCGDNFEEVFYLV

SEQ ID NO: 32983 - protein, 981 aa, Furcula furcula
MQDVNSTILAPMPQPCSQVSNSSLENLVKCDQCSQARFFRGKRGLNIHIGRAHKSHPAVPVSDPSCSRPVSTANSNFTNIPFWQRISSLKRNVPLIKRIPRGARISVANALSSCIQKILNHNTQCAWEELLTFPYRVLHVSAIKAGEKISLTQKIKLNCSDLNNVISDLSFGISPIRSRVSGNIIHKIETKANDGDFKGAARMLFSSDIIAPNNADTLSALISKHPSPSVGLHFPNAPPSDQRILISDTVEIMNCISSFKSGSAGGLDGLTPQHLKDLVSNAVGDAGRSLLSNLTALINLMLAGKVPLEITDVLYGANLCALSKKDGGIRPIAIGSTIRRIASKVCCRRILPTVSQIFQPIQLGFGSKGGCEAAVHAARTFLLQNGGEVLLKVDVKNAFNSVDRAALLTQVQNNIPEIYPYVFQCYGQPSKLLYNEHPICSAVGCQQGDPLGPAIFSLAIHQIICTLNSKFNVWYLDDGTLGGSADSVYADFEILINEFQKIGLEFNFSKCEIFVSDSVAEARKNLIINKFSILASNIKVLSKESLYLLGAPILDEAIPSFVDEKIKKFHDSSDRIFKINSHLAFFIMRFCLFVPKFTYFLRCSQLFKFKSHLTTLDDLIRCCLTKILNCPFEEERVWTQATLPICLGGLGVRKISDLALPAFLSSVYSTEILSRSIIVSALGSVEVTYLSEARNAWLLACPGSDPPILTHSQRQWDKPLCNSIWHSLLSSSVNDLDRARLLAVSAKESGHWLQAMPSSHIGTLLTNTTLSLAVCLRVGARTNLPHRCRCGEYVDKYGHHGLSCSRSAGRMSRHAALNDIIRRGLVTAGVPAVLEPVGITRDDGKRPDGVTLIPWQHGKPLVWDATCVDTLAASHTPATCRAAGGAAATASDAKRRKYAALGSSYIFAPFAVETMGPWSHETHTLVKEISSKLIEVSGDRRAGSFFCQRISLAIQRGNAASLLGTLPSQCGDNFEEVFYLV

SEQ ID NO: 32984 - protein, 980 aa, Furcula furcula
MQDVNSTILAPMPQPCSQVSNSSLENLVKCDQCSQARFFRGKRGLNIHIGRAHKSHPAVPVSDPSCSRPVSTANSNFTNIPFWQRISSLKRNVPLIKRIPRGARISVANALSSCIQKILNHNTQCAWEELLTFPYRVLHVSAIKAGEKISLTQKIKLNCSDLNNVISDLSFGISPIRSRVSGNIIHKIETKANDGDFKGAARMLFSSDIIAPNNADTLSALISKHPSPSVGLHFPNAPPSDQRILISDTVEIMNCISSFKSGSAGGLDGLTPQHLKDLVSNTVGDAGRSLLSNLSALINLMLAGNVPLEITDVLYGANLCALSKKDGGIRPIAIGSTIRRIASKVCCRRILPTVSQIFQPIQLGFGSKGGCEAAVHAARTFLLQNGGEVLLKVDVKNAFNSVDRAALLTQVQNNIPEIYPYVFQCYGQPSKLLYNEHPICSAVGCQQGDPLGPAIFSLAIHQIICTLNSKFNVWYLDDGTLGGSADSVYADFEILINEFQKIGLEFNFSKCEIFVSDSVAEARKNLIINKFSILASNIKVLSKESLYLLGAPILDEAIPSFVDEKIKKFHDSSDRIFKINSHLAFFIMRFCLFVPKFTYFLRCSQLFKFKSHLTTLDDLFRCCLTKILNCPFEEERVWTQATLPIYLGGLGVRKISDLALPAFLSSVYSTEILSRSIIVSALGSVEVTYLSEARNAWLLACPGSDPPILTHSQRQWDKPLCNSIWHSLLSSSVNDLDRARLLAVSAKESGHWLQAMPSSHIGTLLTNTTLSLAVCLRVGARTNLPHRCRCGEYVDKYGHHGLSCSRSAGRMSRHAALNDIIRRGLVTAGVPAVLEPVGITRDDGKRPDGVTLIPWQHGKPLVWDATCVDTLAASHTPATCRAAGGAAATASDAKRRKYADLGSSYIFAPFAVETMGPWSHETHALVKEISSKLIEVSGDRRAGSFFCQRISLAIQRGNAVSLLGVPFPPSAATTSRKFFT

SEQ ID NO: 32985 - protein, 981 aa, Furcula furcula
MQDVNSTILAPMPQPCSQVSNSSLENLVKCDQCSQARFFRGKRGLNIHIGRAHKSHPAVPVSDPSCSRPVSTANSNFTNIPFWQRISSLKRNVPLIKRIPRGARMSVANALSSCIQKILNHNTQCAWEELLTFPYRVLHVSAIKAGEKISLTQKIKLNCSDLNNVISDLSFGISPIRSRVSGNIIHKIETKANDGDFKGAARMLFSSDIIAPNNADTLSALISKHPSPSVGLHFPNAPPSDQRILISDTVEIMNCISSFKSGSAGGLDGLTPQHLKDLVSNAVGDAGRSLLSNLTALINLMLAGKVPLEITDVLYGANLCALSKKDGGIRPIAIGSTIRRIASKVCCRRILPTVSQIFQPIQLGFGSKGGCEAAVHAARTFLLQNGGEVLLKVDVKNAFNSVDRAALSTQVQNNIPEIYPYVFQCYGQPSKLLYNEHPICSAVGCQQGDPLGPAIFSLAIHQIICTLNSKFNVWYLDDGTLGGSADSVYADFEILINEFQKIGLEFNFSKCEIFVSDSVAEARKNLIINKFSILASNIKVLSKESLYLLGAPILDEAIPSFVDEKIKKFHDSSDRIFKINSHLAFFIMRFCLFVPKFTYFLRCSQLFKFKSHLTTLDDLIRFCLTKILNCPFEEERVWTQATLPICLGGLGVRKISDLALPAFLSSVYSTEILSRSIIVSALGSVEVTYLSEARNAWLLACPGSDPPILTHSQRQWDKPLCNSIWHSLLSSSVNDLDRARLLAVSAKESGHWLQAMPSSHIGTLLTNTTLSLAVCLRVGARTNLPHRCRCGEYVDKYGHHGLSCSRSAGRMSRHAALNDIIRRGLVTAGVPAVLEPVGITRDDGKRPDGVTLIPWQHGKPLVWDATCVDTLAASHTPATCRAAGGAAATASDAKRRKYAALGSSYIFAPFAVETMGPWSHETHTLVKEISSKLIEVSGDRRAGSFFCQRISLAIQRGNAASLLGTLPSQCGDNFEEVFYLV

SEQ ID NO: 32986 - protein, 981 aa, Furcula furcula
MQDVNSTILAPMPQPCSQVSNSSLENLVKCDQCSQARFFRGKRGLNIHIGRTHKSHPAVPVSDSSCSRPVSTANSNFTNIPFWQRISSLKRNVPLIKRIPRGARISVANALSSCIQKILNHNTQCAWEELLTFPYRVLHVSAIKAGEKISLTQNIKLNCSDLNNVISDLSFGISPIRSRVSGNIIHKIETKANDGDFKGAARMLFSSDIIAPNNADTLSALISKHPSPSVGLHFPNAPPSDQRILISDTVEIMNCISSFKSGSAGGLDGLTPQHLKDLVSNAVGDAGRSLLSNLTALINLMLAGKVPLEITDVLYGANLCALSKKDGGIRPIAIGSTIRRIASKVCCRRILPTVSQIFQPIQLGFGSKGGCEAAVHAARTFLLQNGGEVLLKVDVKNAFNSVDRAALLTQVQNNIPKIYPYVFQCYGQPSKLLYNEHPICSAVGCQQGDPLGPAIFSLAIHQIICTLNSKFNVWYLDDGTLGGSADSVYADFEILINEFQKIGLEFNFSKCEIFVSDSVAEARKNLIINKFSILASNIKVLSKESLYLLGAPILDEAIPSFVDEKIKKFHDSSDRIFKINSHLAFFIMRFCLFVPKFTYFLRCSQLFKFKSQLTTLDDLIRCCLTKILNCPFEEERVWTQATLPICLGGLGVRKISDLALPAFLSSVYSTEILSRSIIVSALGSVEVTYLSEARNAWLLACPGSDPPILTHSQRQWDKPLCNSIWHSLLSSSVNDLDRARLLAVSAKESGHWLQAMPSSHIGTLLTNTTLSLAVCLRVGARTNLPHRCRCGEYVDKYGHHGLSCSRSAGRMSRHAALNDIIRRGLVTAGVPAVLEPVGITRDDGKRPDGVTLIPWQHGKPLVWDATCVDTLAASHTPATCRAAGGAAATASDAKRRKYAALGSSYIFAPFAVETMGPWSHETHALVKEISSKLIEVSGDRRAGSFFCQRISLAIQRGNAASLLGTLPSQCSDNFEEVFYLV

SEQ ID NO: 32987 - protein, 981 aa, Furcula furcula
MQDINRTILAPMPQPCSQVSNSALENLVKCDQCSQARFFRGKRGLNIHIGRAHKSHPAVPVSDPSCSRPVSTANSNVTNLPFWQRISSLKRNVPLIKRIPRGARISVANALSSCIQKILNHNTQCAWEELLTFPYRVLHVTAIKAGEKNSLTQKIKLNCSDLNNVISDLSFGISPIRSRVSGNIIHKIETKANDGDFKGAARMLFSSDIIAPNNADTLSALMSKHPSPSVGLHFPDAPPLDQRILISDTVEIINCISSFKSGSAGGLDGLTPQHLKDLVSNAVGDAGRSLLSNLSALINLMLAGKVPLEITDVLYGANLCALSKTDGGIRPIAIGSTIRRIASKVCCRRILPTVSQIFQPIQLGFGSKGGCEAAVHAARTFLLQNGGEVLLKVDVKNAFNSVDRAALLTQVQNNIPEIYPYVFQCYGQPSKLLYNEHPICSAVGCQQGDPLGPAIFSLAIHQIICTLNSKFNVWYLDDGTLGGSADSVYDDFEILINEFQKIGLEFNFSKCEIFVLDSVSEARKNLIINKFSILASNIKVLSKESLYLLGAPVLDEAIPSFVDEKIKKFHDSSDRIFKINSHLAFFIIRFCLFVPKFTYFLRCSQLFKFKSHLTILDDLIRCCLTKILNCPFEEDRVWTQATLPIGLGGLGVRKISDLALPAFLSSVYSTETLSRSIIVSALGSVEVTYLSEARNAWLLACPGSDPPILTHSQRQWDKPLCNSIWHSLLTSSVNDLDRARLLAVSAKESGHWLQAMPSSHIGTLLTNTTLSLAVCLRVGARTNLPHRCRCGEYVDKYGHHGLSCSRSAGRMSRHAALNDIIRRGLVTAGVPAVLEPVGITRDDGKRPDGVTLIPWQHGKPLVWDATCVDTLAASHTPATCRAAGGAAATASVAKRRKYAALGSSYIFAPFAVETMGPWSHETHALVKEISSKLIEVSGDRRAGSFFCQRISLAIQRGNAASLLGTLPSQCGDNFEEVFYLV

SEQ ID NO: 32988 - protein, 981 aa, Furcula furcula
MQDVNRTILAPMPQPCSQVSNSSLENLVKCDQCSQARFFRGKRGLNIHIGRAHKSHPAVPVSDPSCSRPVSTTNSNVTNLPFWQRISSLKRNVPLIKRIPRGARISVANALSSCIQKILNHNTQCAWEELLTFPYRVLHVTAIKAGEKISLTQKIKLNCFDLNNVISDLSFGISPIRSRVSGNIIHKIETKANDGDFKGAARMLFSSDIIAPNNADTLSALMSKHPSPSVGLHFPDAPPLDQRILISDTVEIMNCISSFKSGSAGGLDGLTPQHLKDLVSNAVGDAGRSLLSNLTALINLMLAGKVPLEITDVLYGANLCALSKKDGGIRPIAIGSTIRRIASKVCCRRILPTVSQIFQPIQLGFGSKGGCEAAVHAARTFLLQNGGEVLLKVDVKNAFNSVDRAALLTQVQNNIPEIYPYVFQCYGQPSKLLYNEHPICSAVGCQQGDPLGPAIFSLAIHQIICTLNSKFNVWYLDDGTLGGSADSVYDDFEILINEFQKIGLEFNFSKCEIFVLDSVPEARKNLIINKFSSLASNIKVLSKESLYLLGAPVLDEAIPSFVDEKIKKFHDSSDRIFKINSHLAFFIIRFCLFVPKFTYFLRCSQLFKFKSHLTSLDDLIRCCLTKILNCPFEEDRVWTQATLPIGLGGLGVRKISDLALPAFLSSVYSTETLSRSIIVSALGSVEVTYLSEARNAWLLACPGSDPPILTHSQRQWDKPLCNSIWHSLLTSSVNDLDRARLLAVSAKESGHWLQAMPSSHIGTLLTNTTLSLAVCLRVGARTNLPHRCRCGEYVDKYGHHGLSCSRSAGRMSRHAALNDIIRRGLVTAGVPAVLEPVGITRDDGKRPDGVTLIPWQHGKPLVWDATCVDTLAASHTPATCRAAGGAAAAASVAKRRKYAALGSSYIFAPFAVETMGPWSHETHALVKEISSKLIEVSGDRRAGSFFCQRISLAIQRGNAASLLGTLPSQCGDNFEEVFYLV

SEQ ID NO: 32989 - protein, 981 aa, Furcula furcula
MQDVNRTILAPMPQPCSQVSNSSLENLVKCDQCSQARFFRGKRGLNIHIGRAHKSHPAVPVSDPSCSRPVSTANSNVTNLPFWQRISSLKRNVPLIKRIPRGARISVANALSSCIKKILNHNTQCAWEELLTFPYRVLHVTAIKAGEKISLTQKIKLNCSDLNNVISDLSFGISPIRSRVSGNIIHKIETKANDGDFKGAARMLFSSDIIAPNNADTLSALMSKHPSPSVGLHFPDAPPLDQRILISDTVEIMNCISSFKSGSAGGLDGLTPQHLKVLVSNAVGDAGRSLLSNLTALINLMLAGKVPLEITDVLYGANLCALSKKDGGIRPIAIGSTIRRIASKVCCRRILPTVSQIFQPIQLGFGSKGGCEAAVHAARTFLLQNGGEVLLKVDVKNAFNSVDRAALLTQVQNNIPEIYPYVFQCYGQPSKLLYNEHPICSAVGCQQGDPLGPAIFSLAIHQIICTLNSKFNVWYLDDGTLGGSADSVYDDFEILINEFQKIGLEFNFSKCEIFVLDSVSEARKNLIINKFSILASNIKVLSKESLYLLGAPVLDEAIPSFVDEKIKKFHDSSDRIFKINSHLAFFIIRFCLFVPKFTYFLRCSQLFKFKSHLTTLDDLIRCCLTKILNCPFEEDRVWTQATLPIGLGGLGVRKISDLALPAFLSSVYSTETLSRSIIVSALGSVEVTYLSEARNAWLLACPGSDPPILTHSQRQWDKPLCNSIRHSLLTSSVNDLDRARLLAVSAKESGHWLQAMPSSHIGTLLTNTTLSLAVCLRVGARTNLPHRCRCGEYVDKYGHHGLSCSRSAGRMSRHAALNDIIRRGLVTAGVPAVLEPVGITRDDGKRPDGVTLIPWQHGKPLVWDATCVDTLAASHTPATCRAAGGAAAAASVAKRRKYAALGSSYIFAPFAVETMGPWSHETHALVKEISSKLIEVSGDRRAGSFFCQRISLAIQRGNAASLLGTLPSQCGDNFEEVFYLV

SEQ ID NO: 32990 - protein, 981 aa, Furcula furcula
MQDVNRTILAPMPQPCSQVSNSSLENLVKCDQCSQARFFRGKRGLNIHIGRAHKSHPAVPVSDPSCSRPVSTANSNVTNLPFWQRISSLKRNVPLIKRIPRGARISVANALSSCIKKILNHNTQCAWEELLTFPYRVLHVTAIKAGEKISLTQKIKLNCSDLNNVISDLSFGISPIRSRVSGNIIHKIETKANDGDFKGAARMLFSSDIIAPNNADTLSALMSKHPSPSVGLHFPDAPPLDQRILISDTVEIMNCISSFKSGSAGGLDGLTPQHLKDLVSNAVGDAGRSLLSNLTALINLMLAGKVPLEITDVLYGANLCALSKKDGGIRPIAIGSTIRRIASKVCCRRILPTVSQIFQPIQLGFGSKGGCEAAVHAARTFLLQNGGEVLLKVDVKNAFNSVDRAALLTQVQNNIPEIYPYVFQCYGQPSKLLYNEHPICSAVGCQQGDPLGPAIFSLAIHQIICTLNSKFNVWYLDDGTLGGSADSVYDDFEILINEFQKIGLEFNFSKCEIFVLDSVSEARKNLIINKFSILASNIKVLSKESLYLLGAPVLDEAIPSFVDEKIKKFHDSSDRIFKINSHLAFFIIRFCLFVPKFTYFLRCSQLFKFKSHLTTLDDLIRCCLTKILNCPFEEDRVWTQATLPIGLGGLGVRKISDLALPAFLSSVYSTETLSRSIIVSALGSVEVTYLSEARNAWLLACPGSDPPILTHSQRQWDKPLCNSIRHSLLTSSVNDLDRARLLAVSAKESGHWLQAMPSSHIGTLLTNTTLSLAVCLRVGARTNLPHRCRCGEYVDKYGHHGLSCSRSAGRMSRHAALNDIIRRGLVTAGVPAVLEPVGITRDDGKRPDGVTLIPWQHGKPLVWDATCVDTLAASHTPATCRAAGGAAAAASVAKRRKYAALGSSYIFAPFAVETMGPWSHETHALVKEISSKLIEVSGDRRAGSFFCQRISLAIQRGNAASLLGTLPSQCGDNFEEVFYLV

SEQ ID NO: 32991 - protein, 927 aa, Furcula furcula
MQDVNRTILAPMPQPCSQVSNSSLENLVKCDQCSQARFFRGKRGLNIHIGRAHKSHPAVPVSDSSCSRPVSTANSNFTNIPFWQRISSLKRNVPLIKRIPRGARISVANALSSCIQKILNHNTQCAWEELLTFLYRVLHVTAIKAGEKISLTQKIKLNCSDLNNVISDLSFGISPIRSRVSGNIIHKIETKANDGDLKGAARMLFSSDIIAPNNADTLSALISKHPSPSVGLHFPNAPPSDQRILISDTVEIMNCISSFKSGSAGGLDGLTPEHLKDLVSKAVGDAGRSLLSNLTALINLMLAGKVPLEITDVLYGANLCALSKKDGGIRPIAIGSTIRRIASKVCCRRILPTVSQIFQPIQLGFGSKGGCEAAVHAARTFLLQNGGEVLLKVDVKNAFNSVDRAAWLTQVQNNIPEIYPYVFQCYGQPSKLLYNEHPICSAVGCQQGDPLGPAIFSLAIHQIICTLNSKFNVWYLDDGTLGGSADSVYADFEILINEFQKIGLEFNFLKCEIFVSDSVAEARKNLIINKFSILASNIKVLSKESLYLLGAPILDEAIPSFVDEKIKKFHDSSDRIFKINSHLAFFIMRFCLFVPKFTYFLRCSQLFKFKSHLTTLDDLIRCCLTKILNCPFEEERVWTQATLPICLGGLGVRKISDLALPAFLSSVYSTEILSRSIIVSALGSVEVTYLSEARNAWLLACPGSDPPILTHSQRQWDKPLCNSIWHSLLSSSVNDLDRARLLAVSAKESGHWLQAMPSSHIGTLLTNTTLSLAVCLRVGARTNLPHRCRCGEYVDKYGHHGLSCSRSAGRMSRHAALNDIIRRGLVTAGVPAVLELVGITRDDGKRPDGVTLIPWQHGKPLVWDATCVDTLAASHTPATCRAAGGAAATASDAKRRKYAALGSSYIFAPFAVETMGPWSHETHALVK

SEQ ID NO: 32992 - protein, 981 aa, Furcula furcula
MQDVNRTILAPMPQPCSQVSNSSLENLVKCDQCSQARFFRGKRGLNIHIGRAHKSHPAVPVSDPSCSRPVSTTNSNVTNLPFWQRISSLKRNVPLIKRIPRGARISVANALSSCIQKILNHNTQCAWEELLTFPYRVLHVTAIKAGEKISLTQKIKLNCSDLNNVISDLSFGISPIRSRVSGNIIHKIETKANDGDFKGAARMLFSSDIIAPNNADTLSALMSKHPSPSVGLHFPDAPPLDQRILISDTVEIMNCISSFKSGSAGGLDGLTPQHLKDLVSNAVGDAGRSLLSNLTALINLMLAGKVPLEITDVLYGANLCALSKKDGGIRPIAIGSTIRRIASKVCCRRILPTVSQIFQPIQLGFGSKGGCEAAVHAARTFLLQNGGEVLLKVDVKNAFNSVDRAALLTQVQNNIPEIYPYVFQCYGQPSKLLYNEHPICSAVGCQQGDPLGPAIFSLAIHQIICTLNSKFNVWYLDDGTLGGSADSVYDDFEILINEFQKIGLEFNFSKCEIFVLDSVPEARKNLIINKFSSLASNIKVLSKESLYLLGAPVLDEAIPSFVDEKIKKFHDSSDRIFKINSHLAFFIIRFCLFVPKFTYFLRCSQLFKFKSHLTSLDDLIRCCLTKILNCPFEEDRVWTQATLPIGLGGLGVRKISDLALPAFLSSVYSTETLSRSIIVSALGSVEVTYLSEARNAWLLACPGSDPPILTHSQRQWDKPLCNSIWHSLLTSSVNDLDRARLLAVSAKESGHWLQAMPSSHIGTLLTNTTLSLAVCMRVGARTNLPHRCRCGEYVDKYGHHGLSCSRSAGRMSRHAALNDIIRRGLVTAGVPAVLEPVGITRDDGKRPDGVTLIPWQHGKPLVWDATCVDTLAASHTPATCRAAGGAAAAASVAKRRKYAALGSSYIFAPFAVETMGPWSRETHALVKEISSKLIEVSGDRRAGSFFCQRISLAIQRGNAASLLGTLPSQCGDNFEEVFYLV

SEQ ID NO: 32993 - protein, 981 aa, Furcula furcula
MQDVNSTILAPMPQPCSQVSNSSLENLVKCDQCSQARFFRGKRGLNIHIGRAHKSHPAVPVSDPSCSRPVSTANSNFTNIPFWQRISSLKRNVPLIKRIPRGARISVANALSSCIQKILNHNTQCAWEELLTFPYRVLHVSAIKAGEKISLTQKIKLNCSDLNNVISDLSFGISPIRSRVSGNIIHKIETKANDGDFKGAARMLFSSDIIAPNNADTLSALISKHPSPSVGLHFPNAPPSDQRILISDTVEIMNCISSFKSGSAGGLDGLTPQHLKDLVSNAVGDAGRSLLSNLTALINLMLAGKVPLEITDVLYGANLCALSKKDGGIRPIAIGSTIRRIASKVCCRRILPTVSQIFQPIQLGFGSKGGCEAAVHAARTFLLQNGGEVLLKVDVKNAFNSVDRAALLTQVQNNIPEIYPYVFQCYGQPSKLLYNEHPICSAVGCQQGDPLGPAIFSLAIHQIICTLNSKFNVWYLDDGTLGGSADSVYADFEILINEFQKIGLEFNFSKCEIFVSDSVAEARKNLIINKFSILASNIKVLSKESLYLLGAPILDEAIPSFVEEKIKKFHDSSDRIFKINSHLAFFIMRFCLFVPKFTYFLRCSQLFKFKSHLTTLDDLIRCCLTKILNCPFEEERVWTQATLPICLGGLGVRKISDLALPAFLSSVYSTEILSRSIIVSALGSVEVTYLSEARNAWLLACPGSDPPILTHSQRQWDKPLCDSIWHSLLSSSVNDLDRARLLAVSAKESGHWLQAMPSSHIGTLLTNTTLSLAVCLRVGARTNLPHRCRCGEYVDKYGHHGLSCSRSAGRMSRHAALNDIIRRGLVTAGVPAVLEPVGITRDDGKRPDGVTLIPWQHGKPLVWDATCVDTLAASHTPASCRVAGGAAATASDAKRRKYAALGSSYIFAPFAVETMGPWSHETHALVKEISSKLIEVSGDRWAGSFFCQRISLAIQRGNAASLLGTLPSQCGDNFEEVFYLV

SEQ ID NO: 32994 - protein, 779 aa, Furcula furcula
MLFSSDIIAPNNADTLSALMSKHPSPSVGLHFPDAPPLDQRILISDTVEIMNCISSFKSGSAGGLDGLTPQHLKVLVSNAVGDAGRSLLSNLTALINLMLAGKVPLEITDVLYGANLCALSKKDGGIRPIAIGSTIRRIASIVCCRRILPTVSQIFQPIQLGFGSKGGCEAAVHAARTFLLQNGGEVLLKVDVKNAFNSVDRAALLTQVQNNIPEIYPYVFQCYGQPSKLLYNEHPICSAVGCQQGDPLGPAIFSLAIHQIICTLNSKFNVWYLDDGTLGGSADSVYDDFEILINEFQKIGLEFNFSKCEIFVLDSVPEARKNLIINKFSSLASNIKVLSKESLYLLGAPVLDEAIPSFVDEKIKKFHDSSDRIFKINSHLAFFIIRFCLFVPKFTYFLRCSQLFKFKSHLTSLDDLIRCCLTKILNCPFEEDRVWTQATLPIGLGGLGVRKISDLALPAFLSSVYSTETLSRSIIVSALGSVEVTYLSEARNAWLLACPGSDPPILTHSQRQWDKPLCNSIWHSLLTSSVNDLDRARLLAVSAKESGHWLQAMPSSHIGTLLTNTTLSLAVCLRVGARTNLPHRCRCGEYVDKYGHHGLSCSRSAGRMSRHATLNDIIRRGLVTAGVPAVLEPVGITRDDGKRPDGVTLIPWQHGKPLVWDATCVDTLAASHTPATCRAAGGAAAAASVAKRRKYAALGSSYIFAPFAVETMGPWSHETHALVKEISSKLIEVSGDRRAGSFFCQRISLAIQRGNAASLLGTLPSQCGDNFEEVFYLV

SEQ ID NO: 32995 - protein, 981 aa, Furcula furcula
MQDVNSTILAPMPQPCSQVSNSSLENLVKCDQCSQARFFRGKRGLNIHIGRAHKSHPAVPVSDPSCSRPVSTANSNFTNIPFWQRISSLKRNVPLIKRIPRGARMSVANALSSCIQKILNHNTQCAWEELLTFPYRVLHVSAIKAGEKISLTQKIKLNCSDLNNVISDLSFGISPIRSRVSGNIIHKIETKANDGDFKGAARMLFSSDIIAPNNADTLSALISKHPSPSVGLHFPNAPPSDQRILISDTVEIMNCISSFKSGSAGGLDGLTPQHLKDLVSNAVGDAGRSLLSNLTALINLMLAGKVPLEITDVLYGANLCALSKKDGGIRPIAIGSTIRRIASKVCCRRILPTVSQIFQPIQLGFGSKGGCEAAVHAARTFLLQNGGEVLLKVDVKNAFNSVDRAALLTQVQNNIPEIYPYVFQCYGQPSKLLYNEHPICSAVGCQQGDPLGPAIFSLAIHQIICTLNSKFNVWYLDDGTLGGSADSVYADFEILINEFQKIGLEFNFSKCEIFVSDSVAEARKNLIINKFSILASNIKVLSKESLYLLGAPILDEAIPSFVDEKIKKFHDSSDRIFKINSHLAFFIMRFCLFVPKFTYFLRCSQLFKFKSHLTTLDDLIRFCLTKILNCPFEEERVWTQATLPICLGGLGVRKISDLALPAFLSSVYSTEILSRSIIVSALGSVEVTYLSEARNAWLLACPGSDPPILTHSQRQWDKPLCNSIWHSLLSSSVNDLDRARLLAVSAKESGHWLQAMPSSHIGTLLTNTTLSLAVCLRVGARTNLPHRCRCGEYVDKYGHHGLSCSRSAGRMSRHAALNDIIRRGLVTAGVPAVLEPVGITRDDGKRPDGVTLIPWQHGKPLVWDATCVDTLAASHTPATCRAAGGAAATASDAKRRKYAALGSSYIFAPFAVETMGPWSHETHTLVKEISSKLIEVSGDRRAGSFFCQRISLAIQRGNAASLLGTLPSQCGDNFEEVFYLV

SEQ ID NO: 32996 - protein, 927 aa, Furcula furcula
MQDVNRTILAPMPQPCSQVSNSSLENLVKCDQCSQARFFRGKRGLNIHIGRAHKSHPAVPVSDPSCSRPVSTANSNFTNIPFWQRISSLKRNVPLIKRIPRGARISVANALSSCIQKILNHNTQRAWEELLTFPYRVLHVTAIKAGEKISLTQKIKLNCSDLNNVISDLSFGISPIRSRVSGNIIYKIESKANDGDFKGAARMLFSSDSIAPNNADTLSALISKHPSPSVGLHFPNAPPSDQRILISDTVEIMNCISSFKSGSAGGLDGLTPQHLKDLVSNAVGDAGRSLLSNLTALINLMLAGKVPLEITDVLYGANLCALSKKDGGIRPIAIGSTIRRIASKVCCRRILPTVSQIFQPIQLGFGSKGGCEAAVHAARTFLLQNGGEVLLKVDVKNAFNSVDRAALLTQVQNNIPEIYPYVFQCYGQPSKLLYNEHPICSAVGCQQGDPLGPAIFSLAIHQIICTLNSKFNVWYLDDGTLGGSADSVYADFEILINEFQKIGLEFNFSKCEIFVSDSVAEARKNLIINKFSILASNIKVLSKESLYLLGAPILDEAIPSFVDEKIKKFHDSSDRIFKINSHLAFFIMRFCLFVPKFTYFLRCSQLFIFKSHLTTLDDLIRCCLTKILNCPFEEERVWTQATLPICLGGLGVRKISDLALPAFLSSVYSTEILSRSIIVSALGSVEVTYLSEARNAWLLACPGSDPPILTHSQRQWDKPLCNSIWHSLLSSSVNDLDRARLLAVSAKESGHWLQAMPSSHIGTLLTNTTLSLAVCLRVGARTNLPHRCRCGEYVDKYGHHGLSCSRSAGRMSRHAALNDIIRRGLVTAGVPAVLEPVGITRDDGKRPDGVTLIPWQHGKPLVWDATCVDTLAASHTPATCRVAGGAAAAASDAKRRKYAALGSSYIFAPFAVETMGPWSHETHALVK

SEQ ID NO: 32997 - protein, 980 aa, Furcula furcula
MQDVNRTILAPMPQPCSQVSNSSLENLVKCDQCSQARFFRGKRGLNIHIGRAHKSHPAVPVSDPSCSRPVSTTNSNVTNLPFWQRISSLKRNVPLIKRIPRGARISVANALSSCIQKILNHNTQCAWEELLTFPYRVLHVTAIKAGEKISLTQKIKLNCSDLNNVISDLSFGISPIRSRVSGNIIHKIETKANDGDFKAARMLFSSDIIAPNNADTLSALMSKHPSPSVGLHFPDAPPLDQRILISDTVEIMNCISSFKSGSAGGLDGLTPQHLKDLVSNAVGDAGRSLLSNLTALINLMLAGKVPLEITDVLYGANLCALSKKDGGIRPIAIGSTIRRIASKVCCRRILPTVSQIFQPIQLGFGSKGGCEAAVHAARTFLLQNGGEVLLKVDVKNAFNSVDRAALLTQVQNNIPEIYPYVFQCYGQPSKLLYNEHPICSAVGCQQGDPLGPAIFSLAIHQIICTLNSKFNVWYLDDGTLGGSADSVYDDFEILINEFQKIGLEFNFSKCEIFVLDSVPEARKNLIINKFSSLASNIKVLSKESLYLLGAPVLDEAIPSFVDEKIKKFHDSSDRIFKINSHLAFFIIRFCLFVPKFTYFLRCSQLFKFKSHLTTLDDLIRCCLTKILNCPFEEDRVWTQATLPIGSGGLGVRKISDLALPAFLSSVYSTETLSRSIIVSALGSVEVTYLSEARNAWLLACPGSDPPILTHSQRQWDKPLCNSIWHSLLTSSVNDLDRARLLAVSAKESGHWLQAMPSSHIGTLLTNTTLSLAVCLRVGARTNLPHRCRCGEYVDKYGHHGLSCSRSAGRMSRHAALNDIIRRGLVTAGVPAVLEPVGITRDDGKRPDGVTLIPWQHGKPLVWDATCVDTLAASHTPATCRAAGGAAAAASVAKRRKYAALGSSYIFAPFAVETMGPWSHETHALVKEISSKLIEVSGDRRAGSFFCQRISLAIQRGNAASLLGTLPSQCGDNFEEVFYLV

SEQ ID NO: 32998 - protein, 970 aa, Furcula furcula
MPQPCSQVSNSSLENLVKCDQCSQARFFRGKRGLNIHIGRAHKSHPAVPVSDPSCSRPVSTANSNFTNIPFWQRISSLKRNVPLIKRIPRGARISVANALSSCIQKILNHNTQCAWEELLTFPYRVLHVSAIKAGEKISLTQKIKLNCSDLNNVISDLSFGISPIRSRVSGNIIHKIETKANDGDFKGAARMLFSSDIIAPNNADTLSALISKHPSPSVGLHFPNALPSDQRILISDTVEIMNCISSFKSGSAGGLDGLTPQHLKDLVSNAVGDAGRSLLSNLTALINLMLAGKVPLEITDVLYGANLCALSKKDGGIRPIAIGSTIRRIASKVCCRRILPTVSQIFQPIQLGFGSKGGCEAAVHAARTFLLQNGGEVLLKVDVKNAFNSVDRAALLTQVQNNIPEIYPYVFQWYGQPSKLLYNEHPICSAVGCQQGDPLGPAIFSLAIHQIICTLNSKFNVWYLDDGTLGGSADSVYADFEILINEFQKIGLEFNFSKCEIFVSDSVAEARKNLIINKFSILASNIKVLSKESLYLLGAPILDEAIPSFVDEKIKKFHDSSDRIFKINSHLAFFIMRFCLFVPKFTYFLRCSQLFKFKSHLTTLDDLIRCCLTKILNCPFEEERVWTQATLPICLGGLGVRKISDLALPAFLSSVYSTEILSRSIIVSALGSVEVTYLSEARNAWLLACPGSDPPILTHSQRQWDKPLCNLIWHSLLSSSVNDLDRARLLAVSAKESGHWLQAMPSSHIGTLLTNTTLSLVVCLRVGARTNLPHRCRCGEYVDKYGHHGLSCSRSAGRMSRHAALNDIIRRGLVTAGVPAVLEPVGITRDDGKRPDGVTLIPWQHGKPLVWDATCVDTLAASHTPATCRAAGGAAATASDAKRRKYAALGSSYIFAPFAVETMGPWSHETHTLVKEISSKLIEVSGDRRAGSFFCQRISLAIQRGNAASLLGTLPSQCGDNFEEVFYLV

SEQ ID NO: 32999 - protein, 981 aa, Furcula furcula
MQDVNSTILAPMPQPCSQVSNSSLENLVKCDQCSQARFFRGKRGLNIHIGRAHKSHPAVPVSDPSCSRPVSTANSNFINIPFWQRISSLKRNVPLIKRIPRGARISVANALSSCIQKILNHNTQCAWEELLTFPYRVLHVSAIKAGEKISLTQKIKLNCSDLNNVISDLSFGISPIRSRVPGNIIHKIETKANDGDFKGAARMLFSSDIIAPNNADTLSALISKHPSPSVGLHFPNAPPSDQRILISDTVEIMNCISSFKSGSAGGLDGLTPQHLKDLVSNAVGDAGRSLLSNLTALINLMLAGKVPLEITDVLYGANLCALSKKDGGIRPIAIGSTIRRIASKVCCRRILPTVSQIFQPIQLGFGSKGGCEAAVHAARTFLLQNGGEVLLKVDVKNAFNSVDRAALLTQVQNNIPEIYPYVFQCYGQPSKLLYNEHPICSAVGCQQGDPLGPAIFSLAIHQIICTLNSKFNVWYLDDGTLGGSADSVYADFEILINEFQKIGLEFNFSKCEIFVSDSVAEARKNLIINKFSILASNIKVLSKESLYLLGAPILDEAIPSFVDEKIKKFHDSSDRIFKINSHLAFFIMRFCLFVPKFTYFLRCSQLFKFKSHLTTLDDLIRCCLTKILNCPFEEERVWTQATLPICLGGLGVRKISDLALPAFLSSVYSTEILSRSIIVSALGSVEVTYLSEARNAWLLACPGSDPPILTHSQRQWDKPLCNSIWHSLLSSSVNDLDRARLLAVSAKESGHWLQAMPSSHIGTLLTNTTLSLAVCLRVGARTNLPHRCRCGEYVDKYGHHGLSCSRSAGRMSRHAALNDIIRRGLVTAGVPAVLEPVGITRDDGKRPDGVTLIPWQHGKPLVWDATCVDTLAASHTPATCRAAGGAAATASDAKRRKYAALGSSYIFAPFAVETMGPWSHETHALVKEISSKLIEVSGDRRAGSFLCQRISLAIQRGNAASLLGTLPSQCGDNFEEVFYLV

SEQ ID NO: 33000 - protein, 981 aa, Furcula furcula
MQDVNRTILAPMPQPCSQVSNSSLENLVKCDQCSQARFFRGKRGLNIHIGRAHKSHPAMPVSDPSCSRPVSTANSNVTNLPFWQRISSLKRNVPLIKRIPRGARISVANALSSCIQKILNHNTQCAWEELLTFPYRVLHVTAIKAGEKISLTQKIKLNCSDLNNVISDLSFGISPIRSRVSGNIIHKIETKANDGDFKGAARMLFSSDIIAPNNADTLSALMSKHPSPSVGLHFPDAPPLDQRILISDTVEIMNCISSFKSGSAGGLDGLTPQHLKDLVSNAVGDAGRSLLSNLTALINLMLAGKVPLEITDVLYGANLCALSKKDGGIRPIAIGSTIRRIASKVCCRRILPTVSQIFQPIQLGFGSKGGCEAAVHAARTFLLQNGGEVLLKVDVKNAFNSVDRAALLTQVQNIIPEIYPYVFQCYGQPSKLLYNEHPICSAVGCQQGDPLGPAIFSLAIHQIICTLNSKFNVWYLDDGTLGGSADSVYDDFEILINEFQKIGLEFNFSKCEIFVLDSVSEARKNLIINKFSILASNIKVLSKESLYHLGAPVLDEAIPSFVDEKIKKFHDSSDRIFKINSHLAFFIIRFCLFVPKFTYFLRCSQLFKFKSHLTILDDLIRCCLTKILNCPFEEDRVWTQATLPIGLGGLGVRKISDLALPAFLSSVYSTETLSRSIIVSALGSVEVTYLSEARNAWLLACPGSDPPILTHSQRQWDKPLCNSIWHSLLTSSVNDLDRARLLAVSAKESGHWLQAMPSSHIGTLLTNTTLSLAVCLRVGARTNLPHRCRCGEYVDKYGHHGLSCSRSAGRMSRHAALNDIIRRGLVTAGVPAVLEPVGITRDDGKRPDGVTLIPWQHGKPLVWDATCVDTLAASHTPATCRAAGGAAAAASVAKRRKYAALGSSYIFAPFVVETMGPWSHETHALVKEISSKLIEVSGDRRAGSFFCQRISLAIQRGNAASLLGTLPSQCGDNFEEVFYLV

SEQ ID NO: 33001 - protein, 779 aa, Furcula furcula
MLFSSDIIAPNNADTLSALISKHPSPSVGLHFPNAPPSDQRILISDTVEIMNCISSFKSGSAGGLDGLTPQHLKDLVSNAVGDAGRSLLSNLTALINLMLAGKVPLEITDVLYGANLCALSKKDGGIRPIAIGSTIRRIASKVCCRRILPTVSQIFQPIQLGFGSKGGCEAAVHAARTFLLQNGGEVLLKVDVKNAFNSVDRAALLTQVQNNIPEIYPYVFQCYGQPSKLLYNEHPICSAVGCQQGDPLGPAIFSLAIHQIICTLNSKFNVWYLDDGTLGGSADSVYADFEILINEFQKIGLEFNFSKCEIFVSDSVAEARKNLIINKFSILASNIKVLSKESLYLLGAPILDEAIPSFVDEKIKKFHDSSDRIFKINSHLAFFIMRFCLFVPKFTYFLRCSQLFKFKSHLTTLDDLIRCCLTKILNCPFEEERVWTQATLPICLGGLGVRKISDLALPAFLSSVYSTEILSRSIIVSALGSVEVTYLSEARNAWLLACPGSDPPILTHSQRQWDKPLCNSIWHSLLSSSVNDLDRARLLAVSAKESGHWLQAMPSSHIGTLLTNTTLSLAVCLRVGARTNLPHRCRCGEYVDKYGHHGLSCSRSAGRMSRHAALNDIIRRGLVTAGVPAVLEPVGITRDDGKRPDGVTLIPWQHGKPLVWDATCVDTLAASHTPATCRAAGGAAATASDAKRRKYAALGSSYIFAPFAVETMGPWSHEAHALVKEISSKLIEVSGDRRAGSFLCQRISLAIQRGNAASLLGTLPSQCGDNFEEVFYLV

SEQ ID NO: 33002 - protein, 981 aa, Furcula furcula
MQDVNRTILAPMPQPCSQVSNSSLENLVKCDQCSQARFFRGKRGLNIHIGRAHKSHPAVPVSDPSCSRLVSTANSNVTNLPFWQRISSLKRNVPLIKRIPRGARISVANALSSCIQKILNHNTQCAWEELLTFPYRVLHVTAIKAGEKISLTQKIKLNCSDLNNVISDLSFGISPIRSRVSGNIIHKIETKANDGDFKGAARMLFSSDIIAPNNADTLSALMSKHPSPSVGLHFPDAPPLDQRILISDTVEIMNCISSFKSGSAGGLDGLTPQHLKDLVSNAVGDAGRSLLSNLTALINLMLAGKVPLEITDVLYGANLCALSKKDGGIRPIAIGSTIRRIASKVCCRRILPTVSQIFQPIQLGFGSKGGCEAAVHAARTFLLQNGGEVLLKVDVKNAFNSVDRAALLAQVQNNIPEIYPYVFQCYGQPSKLLYNEHPICSAVGCQQGDPLGPAIFSLAIHQIICTLNSKFNVWYLDDGTLGGSADSVYDDFEILINEFQKIGLEFNFSKCEIFVLDSVSEARKNLIINKFSILASNIKVLSKESLYLLGAPVLDEAIPSFVDEKIKKFHDSSDRIFKINSHLAFFIIRFCLFVPKFTYFLRCSQLFKFKSHLTILDDLIRCCLTKILNCPFEEDRVWTQATLPIGLGGLGVRKISDLALPAFLSSIYSTETLSRSIIVSALGSVEVTYLSEARNAWLLACPGSDPPILTHSQRQWDKPLCNSIWHSLLTSSVNDLDRARLLAVSAKESGHWLQAMPSFHIGTLLTNTTLSLAVCLRVGARTNLPHRCRCGEYVDKYGHHGLSCSRSAGRMSRHAALNDIIRRGLVTAGVPAVLEPVGITRDDGKRPDGVTLIPWQHGKPLVWDATCVDTLAASHTPATCRAAGGAAATASVAKRRKYAALGSSYIFAPFAVETMGPWSHATHALVKEISSKLIEVSGDRRAGSFFCQRISLAIQRGNAASLLGTLPSQCGDNFEEVFYLV

SEQ ID NO: 33003 - protein, 981 aa, Furcula furcula
MQDVNSTILAPMPQPCSQVSNSSLENLVKCDQCSQARFFRGKRGLNIHIGRAHKSHPAVPVSDPSCSRPVSTANSNFTNIPFWQRISSLKRNVPLIKRIPRGARISVANALSSCIQKILNHNTQCAWEELLTFPYRVLHVSAIKAGEKISLTQKIKLNCSDLNNVISDLSFGISPIRSRVSGNIIHKIETKANDGDFKGAARMLFSSDIIAPNNADTLSALISKHPSPSVGLHFPNAPPSDQRILISDTVEIMNCISSFKSGSAGGLDGLTPQHLKDLVSNAVGDAGRSLLSNLTALINLMLAGKVPLEITDVLYGANLCALSKKDGGIRPIAIGSTIRRIASKVCCRRILPTVSQIFQPIQLGFGSKGGCEAAVHAARTFLLQNGGEVLLKVDVKNAFNSVDRAALLTQVQNNIPEIYPYVFQCYGQPSKLLYNEHPICSAVGCQQGDPLGPAIFSLAIHQIICTLNSKFNVWYLVDGTLGGSADSVYADFEILINEFQKIGLEFNFSKCEIFVSDSVAEARKNLIINKFSILASNIRVLSKESLYLLGAPILDEAIPSFVDEKIKKFHDSSDRIFKINSHLAFFIMRFCLFVPKFTYFLRCSQLFKFKSHLTTLDDLIRCCLTKILNCPFEEERVWTQATLPICLGGLGVRKISDLALPAFLSSVYSTEILSRSIIVSALGSVEVTYLSEARNAWLLACPGSDPPILTHSQRQWDKPLCNSIWHSLLSSSVNDLDRARLLAVSAKESGHWLQAMPSSHIGTLLTNTTLSLAVCLRVGARTNLPHRCRCGEYVDKYGHHGLSCSRSAGRMSRHAALNDIIRRGLVTAGVPAVLEPFGITRDDGKRPDGVTLIPWQHGKPLVWDATCVDTLAASHTPVTCRAAGGAAATASDAKRRKYAALGSSYIFAPFAVETMGPWSHETHTLVKEISSKLIEVSGDRRAGSFFCQRISLAIQRGNAASLLGTLPSQCGDNFEEVFYLV

SEQ ID NO: 33004 - protein, 981 aa, Furcula furcula
MQDVNSTILAPMPQPCSQVSNSSLENLVKCDQCSQARFFRGKRGLNIHIGRAHKSHPAVPVSDPSCSRPVSTANSNFINIPFWQRISSLKRNVPLIKRIPRGARISVANALSSCIQKILNHNTQCAWEELLTFPYRVLHVSAIKAGEKISLTQKIKLNCSDLNNVISDLSFGISPIRSRVSGNIIHKIETKANDGDFKGAARMLFSSDIIAPNNADTLSALISKHPSPSVGLHFPNAPPSDQRILISDTVEIMNCISSFKSGSAGGLDGLTPQHLKDLVSNAVGDAGRSLLSNLTALINLMLAGKVPLEITDVLYGANLCALSKKDGGIRPIAIGSTIRRIASKVCCRRILPTVSQIFQPIQLGFGSKGGCEAAVHAARTFLLQNGGEVLLKVDVKNAFNSVDRAALLTQVQNNIPEIYPYVFQCYGQPSKLLYNEHPICSAVGCQQGDPLGPAIFSLAIHQIICTLNSKFNVWYLDDGTLGGSADSVYADFEILINEFQKIGLEFNFSKCEIFVSDSVAEARKNLIINKFSILASNIKVLSKESLYLLGAPILDEAIPSFVDEKIKKFHDSSDRIFKINSHLAFFIMRFCLFVPKFTYFLRCSQLFKFKSHLTTLDDLIRCCLTKILNCSFEEERVWTQATLPICLGGLGVRKISDLALPAFLSSVYSTEILSRSIIVSALGSVEVTYLSEARNAWLLACPGSDPPILTHSQRQWDKPLCNSIWHSLLSSSVNDLDRARLLAVSAKESGHWLQAMPSSHIGTLLTNTTLSLAVCLRVGARTNLPHRCRCGEYVDKYGHHGLSCSRSAGRMSRHAALNDIIRRGLVTAGVPAVLEPVGITRDDGKRPDGVTLIPWQHGKPLVWDATCVDTLAASHTPATCRAAGGAAATASDAKRRKYAALGSSYIFAPFAVETMGPWSHETHALVKEISSKLIEVSGDRRAGSFLCQRISLAIQRGNAASLLGTLPSQCGDNFEEVFYLV

SEQ ID NO: 33005 - protein, 981 aa, Furcula furcula
MQDVNRTILAPMPQPCSQVSNSSLENLVKCDQCSQARFFRGKRGLNIHIGRAHKSHPAVPVSDPSCSRPVSTANSNFTNIPFWQRISSLKRNVPLIKRIPRGARISVANALSSCIQKILNHNTQCAWEELLTFPYRVLHVTAIKAGEKISLTQKIKLNCSDLNNVISDLSFGISPIRSRVSGNIIHKIETKANDGDFKGAARMLFSSDIIAPNNADTLSALISKHPSPSVGLHFPNAPPSDQRILISDTVEIMNCISSFKSGSAGGLDGLTPQHLKDLVSNAVGDAGRSLLSNLTALINLMLAGKVPLEITDVLYGANLCALSKKDGGIRPIAIGSTIRRIASKVCCRRILPTVSQIFQPIQLGFGSKGGCEAAVHAARTFLLQNGGEVLLKVDVKNAFNSVDRAALLTQVQNNIPEIYPYVFQCYGQPSKLLYNEHPICSAVGCQQGDPLGPAIFSLAIHQIICTLNSKFNVWYLDDGTLGGSADSVYADFEILINEFQKIGLEFNFSKCEIFVSDSVAEARKNLIINKFSILASNIKVLSKESLYLLGAPILDEAIPSYVDEKIKKFHDSSDRIFKINSHLAFFIMRFCLFVPKFTYFLRCSQLFKFKSHLTTLDDLIRCCLTKILNCPFEEERVWTQATLPICLGGLGVRKISDLALPAFLSSVYSTEILSRSIIVSALGSVEVTYLSEARNAWLLACPGSDPPILTHSQRQWDKPLCNSIWHSLLSSSVNDLDRARLLAVSAKESGHWLQAMPSSHIGTLLTNTTLSLAVCLRVGARTNLPHRCRCGEYVDKYGHHGLSCSRSAGRMSRHATLNDIIRRGLVTAGVPAVLEPVGITRDDGKRPDGVTLIPWQHGKPLVWDATCVDTLAASHTPATCRAAGGAAAAASDAKRRKYAALGSSYIFAPFAVETMGPWSHETHALVKEISSKLIEVSGDRRAGSFFCQRISLAIQRGNAASLLGTLPSQCGDNFEEVFYLV

SEQ ID NO: 33006 - protein, 981 aa, Furcula furcula
MQDVNSTILAPMPQPCSQVSNSSLENLVKCDQCSQARFFRGKRGLNIHIGRAHKSHPVVPVSDPSCSRPVSTANSNFTNIPFWQRISSLKRNVPLIKRIPRGARISVANALSSCIQKILNHNTQCAWEELLTFPYRVLHVSAIKAGEKISLTQKIKLNCSDLNNVISDLSFGISPIRSRVSGNIIHKIETKANDGDFKGAARMLFSSDIIAPNNADTLSALISKHPSPSVGLHFPNAPPSDERILISDTVEIMNCISSFKSGSAGGLDGLTPQHLKDLVSNAVGDAGRSLLSNLTALINLMLAGKVPLEITDVLYGANLCALSKKDGGIRPIAIGSTIRRIASKVCCRRILPTVSQFFQPIQLGFGSKGGCEAAVHAARTFLLQNGGEVLLKVDVKNAFNSVDRAALLTQVQNNIPEIYPYVFQCYGQPSKLLYNEHPICSAVGCQQGDPLGPAIFSLAIHQIICTLNSKFNVWYLDDGTLGGSADSVYADFEILINEFQKIGLEFNFSKCEIFVSDSVAEARKNLIINKFSILASNIKVLSKESLYLLGAPILDEAIPSFVDEKIKKFHDSSDRIFKINSHLAFFIMRFCLFVPKFTYFLRCSQLFKFKSHLTTLDDLIRCCLTKILNCPFEEERVWTQATLPICLGGLGVRKISDLALPAFLSSVYSTEILSRSIIVSALGSVEVTYLSEARNAWLLACPGSDPPILTHSQRQWDKPLCNSIWHSLLSSSVNDLDRARLLAVSAKESGHWLQAMPSSHIGTLLTNTTLSLAVCLRVGARTNLPHRCRCGEYVDKYGHHGLSCSRSAGRMSRHAALNDIIRRGLVTAGVPAVLEPVGITRDDGKRPDGVTLIPWQHGKPLVWDATCVDTLAASHTPATCRAAGGAAASASDAKRRKYAALGSSYIFAPFAVETMGPWSHETHTLVKEISSKLIEVSGDRRAGSFFCQRISLAIQRGNAASLLGTLPSQCGDNFEEVFYLV

SEQ ID NO: 33007 - protein, 1304 aa, Furcula furcula
MIVALLSSFLIDCFINNNGTKRARRKWSHDMNVFIWRTYLEITKLETTNSRAFLGPLHDKFIQKFPTMQASRQRVGDQRRAILRNQLLTQEILDAIKTAVKAELEQRETPTSNYNSISQTTQNTELGVQPGTRMRWTDDLNECLIRCYYLESELERNTTAIRKKLRNKFIAINPHLANLSEQRLSDQRRAIINNKYITDRKLQEIRREVGRTLNITENHIELNEQTAPATNSQESAVICRQTLTTIHSQSMIHSAHSSTQASTIHTSLSNTPVNTNSRRTQNRNNTFHFHPEDIKEKFIETLNQFMDTNPTTRPYIPKQKSSKKLGQIIHYINSHILTEHLTDENDFLTNQTIIYCAAYTTTICNGTKIKTPNGNIQHYNNNRIPKWQQRLKNKIELLRKDIGRMTQYIRGNRNRKLTAYVETIKHKYRTHSQHEEPNQTDNQYLDTLKQKLNATASRLRRYMNCTHRKEQNSKFTNNEKQFYRSLTVNTQSTQTSPAITPEVTELHQFWSNIWSNPALHNNQAEWIKKDSDKISDTINVMQFERIPTDIFLKVLNKTHNWKAPGSDHIHNFWYKKFTTAHPILHHHINNFIESPDTMPQYITHGITFMIPKDTDFQNPAKYRPITCLQTIYKILTACIAELIYTHVIDNGILAEEQKGCRKRSQGCKEQLTIDSVTMLQAYRERKDISTMYIDYRKAFDSVPHSWLIYILHHYKIHPQIIKFLEGSMQFWKTKLRILGTDSIETDEISIKRGIFQGDALSPLWFCLALNPLSNMLNQSNQGFVITTQQDTHTALTHLMYMDDIKLYSHTTQSLHELADITQTFSQDIGMEFGIDKCKTFTVIAGNVVQREYTIELGNTIESLNQNESYKYLGFQQARQIHQKQSKDAIKKKFRHRLNTLLKSKLNSRNMIKAINTYAIPILMYTFGIIKWSQTDLITLQRMINTSMTTQRKHHPRSCTQRLTLPRTEGGRGIIDIINLHNKQIKTLRNYFHTQAHQSILHDTVSRADQRLTPLNLNDFNPQHNERITDDKTKIASWEQKSLHGRHRQDLLQPHVDKSASNDWLRRGELFPETEAFMIAIQDQIIDTRNYQKHIIRLPNFPTDLCRHCHSSSETIQHITGACKSIAQTDYKHRHDQVAAIIHQNLAYKCNFITEKLPYYKYRPENVLENNNYRIYWDRTIITDKTIHNNRPDITFLNKTNNTVFLIDVAICNTHNLLTTHTDKIAKYTDLSIEIKTQWQVSTVKTIPIILSSTGVIPKTLHTSLTILDMHPSTLALAQKGVILNRSFSLNITLGLLLEAYLGLL

SEQ ID NO: 33008 - protein, 1389 aa, Furcula furcula
MELRSRVIRKGPLPGGDRRGTPGAGAGCHSMRTIGDGASSRRVPIEKSTTADISSSPISSTHSLFRSPSSSPHSFQIVSRSSSVSSSSTPSSVNVAQEADADNPVPITGTKRARRKWSHDMNVFIWRTYLEITKLETTNSRAFLGPLHDKFIQKFPTMQASRQRVGDQRRAILRNQLLTQEILDAIKTAVKAELEQRETPTSNYNSISQTTQNTELGVQPGTRMRWTDDLNECLIRCYYLESELERNTTAIRKKLRNKFIAINPHLANLSEQRLSDQRRAIINNKYITDRKLQEIRREVGRTLNITENHIELNEQTAPATNSQESAVICRQTLTTIHSQSMIHSAHSSTQASTIHTSLSNTPVNTNSRRTQNRNNTFHFHPEDIKEKFIETLNQFMDTNPTTRPYIPKQKSSKKLGQIIHYINSHILTEHLTDENDFLTNQTIIYCAAYTTAICNGTKIKTPNGNIQHYNNNRIPIWQQILKNKIELLRKDIGRMTQYIRGNRNRKLTAYVETIKHKYRTHSQHEEPNQTDNQYLDTLKQKLNATASRLRRYMNCTHRKEQNSKFTNNEKQFYRSLTVNTQSTQTSPAITPEVTELHQFWSNIWSNPALHNNQAEWIKKDSDKISDTINVMQFERIPTDIFLKVLNKTHNWKAPGSDHIHNFWYKKFTTAHPILHHHINNFIESPDTMPQYITHGITFMIPKDTDFQNPAKYRPITCLQTIYKILTACIAELIYTHVIDNGILAEEQKGCRKRSQGCKEQLTIDSVTMLQAYRERKDISTMYIDYRKAFDSVPHSWLIYILHHYKIHPQIIKFLEGSMQFWKTKLRILGADSIETDEISIKRGIFQGDALSPLWFCLALNPLSNMLNQSNQGFVITTQQDTHTALTHLMYMDDIKLYSHTTQSLHELADITQTFSQDIGMEFGIDKCKTFTVIAGNVVQREYTIELGNTIESLNQNESYKYLGFQQARQIHQKQTKDAIKKKFRHRLNTLLKSKLNSRNMIKAINTYAIPILMYTFGIIKWSQTDLITLQRMINTSMTTQRKHHPRSCTQRLTLPRIEGGRGIIDIINLHNKQIKTLRNYFHTQAHQSILHDTVSRADQRLTPLNLNDFNPQHNERITDDKTKIASWEQKSLHGRHRHDLLQPHVDKSASNDWLRRGELFPETEAFMIAIQDQIIDTRNYQKYIIRLPNFPTDLCRHCHSSSETIQHITGACKSIAQTDYKHRHDQVAAIIHQNLAYKCNFITEKLPYYKYRPENVLENNNYRIYWDRTIITDKTIHNNRPDITFLNKTNNTVFLIDVAICNTHNLLTTHTDKIAKYTDLSIEIKTQWQVSTVKTIPIILSSTGVIPKTLHTSLNILDMHPSTLALAQKAVILNTCRIVRKFLSLTGPQ

SEQ ID NO: 33009 - protein, 1389 aa, Furcula furcula
MELRSRVIRKGPLPGGDRRGTPGAGAGCHSMRTIGDGASSRRVPIEKSTTADISSSPISSTHSLFRSPSSSPHSFQIVSRSSSVSSSNTPSSVNVAQEADADNPVPITGTKRARRKWSHDMNVFIWRTYLEITKLETTNSRAFLGPLHDKFIQKFPTMQASRQRVGDQRRAILRNQLLTQEILDAIKTAVKAELEQRETPTSNYNSISQTTQNTELGVQPGTRMRWTDDLNECLIRCYYLESELERNTTAIRKKLRNKFIAINPHLANLSEQRLSDQRRVIINNKYITERKLQEIRREVGRTLNITENHIELNEQTAPATNSQESAVICRQTLTTIHSQSMIHSAHSSTQASTIHTSLSNTPVNTNSRRTQNRNNTFHFHPEDIKEKFIETLNQFMDTNPTTRPYIPKQKSSKKLGQIIHYINSHILTEHLTDENDFLTNQTIIYCAAYTTAICNGTKIKTPNGNIQHYNNNRIPKWQQRLKNKIELLRKDIGRMTQYIRGNRNRKLTAYVETIKHKYRTHSQHEEPNQTDNQYLDTLKQKLNATASRLRRYMNCTHRKEQNSKFTNNEKQFYRSLTVNTQSTQTSPAITPEVTELHQFWSNIWSNPALHNNQAEWIKKDSDKISDTINVMQFERIPTDIFLKVLNKTHNWKAPGSDHIHNFWYKKFTTAHPILHHHINNFIESPDTMPQYITHGITFMIPKDTDFQNPAKYRPITCLQTIYKILTACIAELIYTHVIDNGILAEEQKGCRKSSQGCKEQLTIDSVTMLQAYRERKDISTMYIDYRKAFDSVPHSWLIYILHHYKIHPQIIKFLEGSMQFWKTKLRILGTDSIETDEISIKRGIFQGDALSPLWFCLALNPLSNMLNQSNQGFVITTQQDTHTALTHLMYMDDIKLYSHTTQSLHELADITQTFSQDIGMEFGIDKCKTFTVIAGNVVQREYTIELGNTIESLNQNESYKYLGFQQARQIHQKQTKDAIKKKFRHRLNTLLKSKLNSRNMIKAINTYAIPILMYTFGIIKWSQTDLITLQRMINTSMTTQRKHHPRSCTQRLTLPRTEGGRGIIDIINLHNKQIKTLRNYFHTQAHQSILHDTVSRADQRLTPLNLNDFNPQHNERITDDKTKIASWEQKSLHGRHRQDLLQPHVDKSASNDWLRRGELFPETEAFMIAIQDQIIDTRNYQKHIIRLPNFPTDLCRHCHSSSETIQHITGACKSIAQTDYKHRHDQVAAIIHQNLAYKCNFITEKLPYYKYRPENVLENNNYRIYWDRTIITDKTIHNNRPDITFLNKTNNTVFLIDVAICNTHNLLTTHTDKIAKYTDLSIEIKTQWQVSTVKTIPIILSSTGVIPKTLHTSLTILDMHPSTLALAQKAVILNTCRIVRKFLSLTGPQ

SEQ ID NO: 33010 - protein, 1389 aa, Furcula furcula
MELRSRVIRKGPLPGGDRRGTPGAGAGCHSMRTIGDGASSRRVPIEISTTADISSSPISSTHSLFRSPSSSPHSFQIVSRSSSVSSSNTPSSVNVAQEADADNPVPITGTKRARRKWSHDMNVFIWRTYLEITKLETTNSRAFLGPLHDKFIQKFPTMQASRQRVGDQRRAILRNQLLTQEILDAIKTAVKAELEQRETPTSNYNSISQTTQNTELGVQPGTRMRWTDDLNECLIRCYYLESELERNTTAIRKKLRNKFIAINPHLANLSEQRLSDQRRAIINNKYITDRKLQEIRREVGRTLNITENHIELNEQTTPATNSQESAVICRQTLTTIHSQSMIHSAHSSTQASTIHTSLSNTPVNTNSRRTQNRNNTFHFHPEDIKEKFIETLNQFMDTNPTTRPYIPKQKSSKKLGQIIHYINSHILTEHLTDKNDFLTNQTIIYCAAYTTAICNGTKIKTPNGNIQHYNNNRIPKWQQRLKNKIELLRKDIGRMTQYIRGNRNRKLTAYVETIKHKYRTHSQHEEPNQTDNQYLDTLKQKLNATASRLRRYMNCTHRKEQNSKFTNNEKQFYRSLTVNTQSTQTSPAITPEVTELHQFWSNIWSNPALHNNQAEWIKKDSDKISDTINVMQFERIPTDIFLKVLNKTHNWKAPGSDHIHNFWYKKFTTAHPILHHHINNFIESPDTMPQYITHGITFMIPKDTDFQNPAKYRPITCLQTIYKILTACIAELIYTHVIDNGILAEEQKGCRKRSQGCKEQLTIDSVTMLQAYRERKDISTMYIDYRKAFDSVPHSWLIYILHHYKIHPQIIKFLEGSMQFWKTKLRILGTDSIEIDEISIKRGIFQGDALSPLWFCLALNPLSNMLNQSNQGFVITTQQDTHTALTHLMYMDDIKLYSHTTQSLHELADITQTFSQDIRMEFGIDKCKTFTVIAGNAVQREYTIELGNTIESLNQNESYKYLGFQQARQIHQKQTKDAIKKKFRHRLNTLLKSKLNSRNMIKAINTYAIPILMYTFGIIKWSQTDLITLQRMINTSMTTQRKHHPRSCTQRLTLPRTEGGRGIIDIINLHNKQIKTLRNYFHTQAHQSILHDTVSRADQRLTPLNLNDFNPQHNERITDDKTKIASWEQKSLHGRHRQDLLQPHVDKSASNYWLRRGELFPETEAFMIAIQDLIIDTRNYQKHIIRLPNFPTDLCRHCHSSSETIQHITGACKSIAQTDYKHRHDQVAAIIHQNLAYKCNFITEKLPYYKYRPENVLENNNYRIYWDRTIITDKTIHNNRPDITFLNKTNNTVFLIDVAICNTHNLLTTHTDKIAKYTDLSIEIKTQWQVSTVKTIPIILSSTGVIPKTLHTSLTILDMHPSTLALAQKAVILNTCRIVRKFLSLTGPQ

SEQ ID NO: 33011 - protein, 1049 aa, Furcula furcula
MIHSAHSSTQASTIHTSLSNTPVNTNSRRTQNRNNTFHFHPEDIKEKFIETLNQFMDTNPTTRPYIPKQKSSKKLGQIIHYINSHILTEHLTDENDFLTNQTIIYCAAYTTAICNGTKIKTPNGNIQHYNNNRIPKWQQRLKNKIELLRKDIGRMTQYIRGNRNRKLTAYVETIKHKYRTHSQHEEPNQTDNQYLDTLKQKLNATASRLRRYMNCTHRKEQNSKFTNNEKQFYRSLTVNTQSTQTSPAITPEVTELHQFWSNIWSNPALHNNQAEWIKKDSDKISDTINVMQFERIPTDIFLKVLNKTHNWKAPGSDHIHNFWYKKFTTAHPILHHHINNFIESPDTMPQYITHGITFMIPKDTDFQNPAKYRPITCLQTIYKILTACIAELIYTHVIDNGILAEEQKGCRKRSQGCKEQLTIDSVTMLQAYRERKDISTMYIDYRKAFDSVPHSWLIYILHHYKIHPQIIKFLEGSMQFWKTKLRILGTDSIETDEISIKRGIFQGDALSPLWFCLALNPLSNMLNQSNQGFVITTQQDTHTALTHLMYMDDIKLYSHTTQSLHELADITQTFSQDIGMEFGIDKCKTFTVIAGNVVQREYTIELGNTIESLNQNESYKYLGFQQARQIHQKQTKDAIKKKFRHRLNTLLKSKLNSRNMIKAINTYAIPILMYTFGIIKWSQTDLITLQRMINTSMTTQRKHHPRSCTQRLTLPRTEGGRGIIDIINLHNKQIKTLRNYFHTQAHQSILHDTVSRADQRLTPLNLNDFNPQHNERITDDKTKIASWEQKSLHGRHRQDLLQPHVDKSASNDWLRRGELFPETEAFMIAIQDQIIDTRNYQKHIIRLPNFPTDLCRHCHSSSETIQHITGACKSIAQTDYKHRHDQVAAIIHQNLAYKCNFITEKLPYYKYRPENVLENNNYRIYWDRTIITDKTIHNNRPDITFLNKTNNTVFLIDVAICNTHNLLTTHTDKIAKYTDLSIEIKTQWQVSTVKTIPIILSSTGVIPKTLHTSLTILDMHPSTLALAQKAVILNTCRIVRKFLSLTGPQ

SEQ ID NO: 33012 - protein, 1380 aa, Adoxophyes honmai
MEAVRKRIEVPQAGTSRGDDAGESRPERRVTRSSGRSTYSGGSDAPRSHAAPRTRAAPAPEAGAQEALLTPRSSSPISSTHSLFPSPNSSPHPFETHLESSFSSTSSMSVDVVREALAENSVPTTGKKSARNKWTPEMNRFIWRTYLTITEMEKRTRVYLDTLYAQFTQKFPEMKVTKSNVGAQRRAIVSNKLLTDEEREAIKNDLLSNLQNRHPITTSQINNNATQQLSQNTQTKRRRWTDDINEAIMRTYYRITNLETNTSAYRTQLHNSIIQEFPELCNVSEQRIADQRRAIVKNKYITEQRLLEIRNEVEQTLPLSNHNSQGTVLHSSSSPTHTTQHNIDHQSQFPSNFEAPDSNNTTFNITAPAQQNPITETQITDRFQVVYDKYRDSNPTTRPYIPKQKTSKRLQQIVQYINNIVLPSYITTEDDFSTTQTIIYCAAYTASVCNGSKIKDAQEVPRQQNSLPPWQKRLENKIQQLRKDIGRMTQYINGNRRERLTYYVTNIKDKHKVHSRHEEENTTDQQFMDTLKQKLNAASSRLKRYVSCTKRKKQNTQFVNSEKQFYRHLTANTQNTHDTSTPTCTLLPEDFHQYWSNIWGRAVEHKQSAEWIEENLHTLNDIPQMQFQHIPIHTFIQVIKKAHNWKSPGTDNIHNFWYKKLTTMHPILHNHINTFIQSPQSMPAYITEGITFMIPKGPDHNNPASYRPITCLQTIYKILTSCITELMYEHISQNNIMSEEQKGCRKYSQGCKEQLIIDSVAMKLAIKNKQDISTMYIDYRKAFDSVPHSWLLHVLHHYKIHPTLINFLRDIMTGWKTKLKLVNNSTAKETQDIPIKRGIFQGDALSPLWFCLALNPLSTMLNRSNYGYTLGTDTHTTSLTHLMYMDDIKLYSNNINTLFKLADITQTFSQDICMEFGIDKCKTFTVRHGIIEDNSYTLQTGEVVEALDQNSSYKYLGFQQSREIHQNRTKTEITLKFTHRLNAVLRSQLNSRNITKALNTYAMPLLTYSFGIINWTQTDLLKLQRKVHTSMTAHRKHHPRSCIQRVTLQREEGGKGITDIPNLHNKQISSLREFFFGRAQHSILHSIVTQSDTRLTPLNLHNRDTQRNERITETKDKITEWQRKSLHGRHRHDLQLPHVDKAASNAWLRRGELFPETEAFMIAIQDQVIDTKNYQKYIIRRPNSTSDFCRHCHSSPETIQHITGACKSIAQSDYKHRHDQVAAIIHQYLAFKHKLVLEKVPYYKYKPQSVLENNSYRIYWDRTIITDKTIHFNRPDITILDKQNKSVILIDIAICNTHNLLTTHTDKTTKYTDLSIEIKTQWQVSKVQTIPIILSTTGVIPHTLHASLRALDIHPSAYTLLQKAVILNTCRIVRKFLAAT

SEQ ID NO: 33013 - protein, 1390 aa, Adoxophyes honmai
MEVVRKRIEVPQAGTSRGDDAGESRPERRVTRSSGRSTYSGGSDAPRTHAAPRTRAAPPSEAETQTLLISPCSSSPISSTHSLFPSPNSSPHPFETRLESSSSSSPSSSNSSMSVDVVREALAANPTPATGTNSARNKWTPEMNKFIWRTYLTITDMEKKTRVYLDTLYSHFIQEFPDMNVTKSHVGAQRRAIVNNKLLTDAERETIKSELLANGHINHPTNTLQIITSSNIAQTLPQRTQTTRRRWTDDINEAIMKTYYKITNLESNTTAYRSQLHSSIIQEFPELVNVSEQRIADQRRAIVKNKYVSEERLQEIRNEVQTALSTANNDLQNTLVCSPNTDTHQNNTQHGTCNPQSLGNDIETLHPRNTTTNSSTHLQSNIITETQISETFKAVYEKYRDSYPTTRPFIPKQKTSKRFQQIVGYINNTILPNYIKPDADFNTTHTVIYCAAYTASVCNGSKIIDEGQDKSIKETNRPSWQLRLENKIKQLRKDIGRITQYTNGNRSERLTYYVQDIKDRHKIHSRHEELNTTDEQFIDTLKQKLNTASSRLRRYLNCTKRKKQNTQFINSEKQFYRHLKSDTQNTQNPTFNCTLSADDLHQYWSNIWGNTVEHNHNAEWIEEDLKTLSDTPQMQFEHIPIHTFIHVLKKTHNWKAPGTDKIHNFWYKKLTFLHPLLHNHINTFIESPQSMPLFISEGITFMIPKDTDHNNPANYRPITCLQTIYKILTSCISELIYDHISQNNVMAEEQKGCRKNSQGCKEQLIIDSVAMKLAIKNKRDITTMYIDYRKAFDSVPHTWLLHVLHHYKIHPTLITFLQNTMTAWKTKLKLVVNSAAIETPEIAINRGIFQGDALSPLWFCLALNPLSNLLNRSKCGYSLITDTQSNGSLTHLMYMDDIKLYSDNITALYKLADITQTFSQDIHMEFGIDKCKTFTVRHGIIEQNNYTLHTGATIESLDEHSSYKYLGFEQSREIHQNRTKTEIIKKFTHRLNTILRSQLNSRNITKAINTFAIPLLTYSFGVISWTQTDLQKLQQKMNTTMTTHRKHHPRSCIQRVTLPREEGGKGIIDIPNLHNRQITNLRKYFLDRAEHSKLHSTIVKTDTRLTPLNLHVRDPQRNERITEHKDKIAAWQRKSLHGRHRHDLQLPHVDKAASNAWLRRGELFPETEAFMIAIQDQIIDTKNYQKYIIRRPNFNSDFCRHCHSSSETIQHITGACKSIAQTDYKHRHDQVAAIIHQNLAIKHKFITVKLPYYKYKPQSVLENDNYRIYWDRTIITDKTIHFNRPDITVLDKQNKSVTLIDIAICNTHNLLTTHTDKTTKYTDLSIEIKTQWQVRNVKTIPIILSTTGVIPHTLHASLRALDIHPSTYTLLQKAIILNTCRIVRKFLSTP

SEQ ID NO: 33014 - protein, 1262 aa, Carposina sasakii
MNIFILRNYLIITRLERNTRTYLDKLHELFIQEFPTMDVSKQRVGDQRRSIIRNNLLPKNILNEIRLDVTKYLEANQTMQNEDYCTPTQNGRMKWSNQMNEALMKIYYEETQLESNTTAYRPKIHSKFLEQYPQLSNLTEQRIADQRRSIVNNKLVTNNRLQQLKDEVRQTLDQNSYNFYEMRTQNCEDTTDPTPGSIPTINTITGIHSPHRNTAVIHEQLETVVDNTHSSSHTPSQTQHHNNNYTTTPGHSVINQEQIIQQFESAIERFKEMDPTARPYIPKQKTSKKLSQIVHYINTEILPNHVSVTHDFSTTHTYIYCAAYTAAICNGTKIKETGASRPFHQKHTPFWQKRLQNKIRILRKDTARMTQYIKGNRSRRLITHIETIKNKYSIHTQHEKPNHTDIQFLDTLKQKLNAATNRLQRYLNCTLRKTQNREFKNNEKQFYRNITANTQHIQITPNTHTTIAPRPEELHRYWSNIWANPVEHNQSANWIKDDARNIENTTHMTFEHIPIDIFMKVLSRAHNWKAPGSDNIHNYWYKKFTKVHSLLYNHINDFIQTPNLLPTFITQGVTYMIPKDTDFHDPAKYRPITCLQTIYKILTSCIAEVIYLHITENNILAEEQKGCRKNSQGCKEQLIIDSVAMKQAYLRKRDISTMYIDYRKAFDSVPHSWLTSILNHYKIHPTIVTFLKSAMQHWKTKLKLINNTTIEIPDISIRRGIFQGDALSPLWFCLALNPLSNQLNKNSKGFPIIAGHNRITLTHLMYMDDIKLYSNSTQSLHSLADITETFSRDIHMQFGIDKCKTFTVRKGKLAQDDYSLQSGDCIQSLDRNTTYKYLGFQQARQIQYKSTKSELIKKFKHRLNVLLRSKLNSRNTIKAINSYAIPILTYSFGIITWSPTDLMKLQRIINTSMTAHRKHHPKSCVQRLTLPRAEGGRGIIDVVNLHNKQIKSLRRYFHKQAQHIRLHKIVTKADQRLTPLNLQDMDTQMHERVTNDKQKMAAWQQKSLHGRHYHDLQQVHVDKIASNAWLQRGELFPETEGFMLAIQDQIIETRNYQKYIIRTPNFPSDACRHCHGSPETIQHITGACRSIAQTDYKHRHDQVAAIVHQYIAFKYNFITQKIPYYKYQPETILENSDIKIYWDRTIITDKTIHHNRPDITILDKINKTAFFIDIAISNTHNLLTTHTEKIAKYTDLSIEIKKQWQISTVRTVPIILSTTGVIPKTLHTSLKTLDIHPSTYTLMQKAVILNTCRIVRKFLSST

SEQ ID NO: 33015 - protein, 1067 aa, Carposina sasakii
MQNEDYCTPTQSGRMKWSNQMNEALMKIYYEETQLESNTTAYRPKIHSKFLEQYPQLSNLTEQRIADQRRSIVNNKLVTNNRLQQLKDEVRQTLDQNSYNFYEMRTQNCEDTTDPTPGSIPTINTITGIHSPHRNTAVTHEQLETVVDNSYSSSHTPSQTQHHNNNYTTTPGHSVINQEQIIQQFESAIERFKEMDPIARPYIPKQKTSKKLSQIVHYINTEILPNHVSVTHDFSTTHTYIYCAAYTAAICNGTKIKETGASRPFHQKHTPFWQKRLQNKIRILRKDTARMTQYIKGNRSRRLITHIETIKNKYSIHTQHEEPNHTDIQFLDTLKQKLNAATNRLQRYLNCTLRKTQNREFKNNEKQFYRNITANTQHIQITPNTHTTLAPRPEELHRYWSNIWANPVEHNQSANWIKDDARNVENTTHMTFEHIPIDIFMKVLSKAHNWKAPGSDNIHNYWYKKFTKVHSLLYNHINDFIQTPNLLPPFITQGVTYMIPKDTDFHDPAKYRPITCLQTIYKILTSCIAEVIYLHITENNILAEEQKGCRKNSQGCKEQLIIDSVAMKQAYLRKRDISTMYIDYRKAFDSVPHSWLTSILNHYKIHPTIVTFLKSAMQHWKTKLKLINNTTIEIPDISIRRGIFQGDALSPLWFCLALNPLSNQLNKNSKGFPIIAGHNRITLTHLMYMDDIKLYSNSTQSLHSLADITETFSRDIHMQFGIDKCKTFTVRKGKLAQDDYSLQSGDCIQSLDRNTTYKYLGYQQARQIQYKSTKSELIKKFKHRLNVLLRSKLNSRNTIKAINSYAILILTYSFGIITWSPTDLMKLQRIINTSMTAHRKHHPRSCVQRLTLPRAEGGRGIIDVVNLHNKQIKSLRHHFHKQAQHIRLHKIVTKADQRLTPLNLQDMDTQMHERVTNDKQKMAAWQQKSLHGRHYHDLQQVHVDKIASNAWLQRGELFPETEGFMLAIQDQIIETRNYQKYIIRTPNFPSDACRHCHGSPETIQHITGACRSIAQTDYKHRHDQVAAIVHQYIAFKHNFITQKVPYYKYQPETILENSDIKNIGTEL

SEQ ID NO: 33016 - protein, 1518 aa, Carposina sasakii
MKAQKKRNIPQEGTGPAGESLPGPKNPGSPTYSGGGDSMSNTNRYNLRLRPRAHSRATNGPAAARSCSLRAKRDKKSSAENCVSTDTNLLSPSSLSLNHTHSTHHAPPILGNISYIPTSTLESDSSSNSRRKYNLRSRPKVNLTSANSPDLSIVSRPENGVPAPAGVPFTYDRHNQPSSPSSGYSLFRSPSSSPHSFQTQFISHSSPSSSPNSLQSQFTLFSSRISLQPVDVVQEANANNTAPTTGYRVRIRWTDQMNIFILRNYLIITRLERNTRTYLDKLHELFIQEFPTMDVSKQRVGDQRRSIIRNNLLPKNILNEIRLDVTKYLEANQTMQNEDYCTPTQSGRMKWSNQMNEALMKIYYEETQLESNTTAYRPKIHSKFLEQYPQLSYLTEQRIADQRRSIVNNKLVTNNRLQQLKDEVRQTLAQNSYNFYEMRTQNCEDTTDPTPGSIPTINTITGIHSPHRNTAVTHEQLETVVDNTHSSSHTPSQTQHHNNNYTTTPGHSVINQEQIIQQFESAIERFKEMDPTARPYIPKQKTSKKLSQIVHYINTEILPNHVSVTHDFSTTHTYIYCAAYTAAICNGTKIKETGASRPFHQKHTPFWQKRLQNKIRILRKDTARMTQYIKGNRSRRLITRIETIKNKYSIHTQHEEPNHNDIQFLDTLKQKLNAATNRLQRYLNCTLRKTQNREFKNNEKQFYRNITANTQHIQITPNTHTTIAPRPEELHRYWSNIWANPVEHNQSANWIKDDARNVENTTHMTFEHIPIDIFMKVLSRAHNWKAPGSDNIHNYWYKKFTKVHSLLYNHINDFIQTPNLLPTFITQGVTYMIPKDTDFHDPAKYRPITCLQTIYKILTSCIAEVIYLHITENNILAEEQKGCRKNSQGCKEQLIIDSVAMKQAYLRKRDISTMYIDYRKAFDSVPHSWLTSILNHYKIHPTIVTFLKSAMQHWKTKLKLINNTTIEIPDISIRRGIFQGDALSPLWFCLALNPLSNQLNKNSKGFPIIAGHNRITLTHLMYMDDIKLYSNSTQSLHSLADITETFSRDIHMQFGIDKCKTFTVRKGKLAQDDYSLQSGDCIQSLDRNTTYKYLGFQQARQIQYKSTKSELIKKFKHRLNVLLRSKLNSRNTIKAINSYAIPILTYSFGIITWSPTDLMKLQRIINTSMTAHRKHHPRSCVQRLTLPRAEGGRGIIDVVNLHNKQIKSLRRYFHKQAQHIRLHKIVTKADQRLTPLNLQDMDTQMHERVTNDKQKMAAWQQKSLHGRHYHDLQQVHVDKIASNAWLQRGELFPETEGFMLAIQDQIIETRNYQKYIIRTPNFSSDACRHCHGSPETIQHITGACRSIAQTDYKHRHDQVAAIVHQYIAFKHNFITQKVPYYKYQPETILENSDIKIYWDRTIITDKTIHHNRPDITILNKINKTAFFIDIAISNTHNLLTTHTEKIAKYTDLSIEIKKQWQISTVRTVPIILSTTGVIPKTLHTSLKTLDIHPSTYTLMQKAVILNTCRIVRKFLSST

SEQ ID NO: 33017 - protein, 1518 aa, Carposina sasakii
MKAQKKRNIPQEGTGPAGESLPGPKNPGSPTYSGGGDSMSNTNRYNLRLRPRPHSRATNGPAAARSCSLRAKRDKKSSAENCVSTDTNLLSPSSLSLNHTHSTHHAPPILGNISYIPTSTLESDSSSNSRRKYNLRSRPKVNLTSANSPDLSIVSRPENGVPAPAGVPFTYDRHNQPSSSSSGYSLFRSPSSSPHSFQTQFISHSSPSSSPNSLQSQFTLFSSRISLQPVDVVQEANANNTAPTTGYRVRIRWTDQMNIFILRNYLIITRLERNTRIYLDKLHELFIQEFPTMDVSKQRVGDQRRSIIRNNLLPKNILNEIRLDVTKYLEANQTMQNEDYCTLTQSGRMKWSNQMNEALMKIYYEETQLESNTTAYRPKIHSKFLEQYPQLSNLTEQRIADQRRSIVNNKLVTNNRLQQLKDEVRQTLDQNSYNFYEMRTQNCEDTTDPTPGLIPTINTITGIHSPHRNTAVTHEQLETVVDNTHSSSHTPSQTQHHNNNNTTTPGHSVINQEQIIQQFESAIERFKEMDPTARPYIPKQKTSKKLSQIVHYINTEILPNHVSVTHDFSTTHTYIYCAAYTAAICNGTKIKETGASRPFHQKHTPFWQKRLQNKIRILRKDTARMTQYIKGNRSRRLITHIETIKNKYSIHTQHEEPNHTDIQFLDTLKQKLNAATNRLQRYLNCTLRKTQNREFKNNEKQFYRNITANTQHIQITPNTHTMLAPRPEELHRYWSNIWANPVEHNQSANWIKDDARNVENTTHMTFEHIPIDIFMKVLSRAHNWKAPGSDNIHNYWYKKFTKVHSLLYNHINDFIQTPNLLPTFITQGVTYMIPKDTDFHDPAKYRPITCLQTIYKILTSCIAEVIYLHITENNILAEEQKGCRKNSQGCKEQLIIDSVAMKQAYLRKRDISTMYIDYRKAFDSVPHSWLTSILNHYKIHPTIVTFLKSAMQHWKTKLKLINNTTIEIPDISIRRGIFQGDALSPLWFCLALNPLSNQLNKNSKGFPIIAGHNRITLTHLMYMDDIKLYSNSTQSLHSLADITETFSRDIHMQFGIDKCKTFTVRKGKLAQDDYSLQSGDCIQSLDRNTTYKYLGFQQARQIQYKSTKSELIKKFKHRLNVLLRSKLNSRNTIKAINSYAIPILTYSFGIITWSPTDLMKLQRIINTSMTAHRKHHPRSCVQRLTLPRAEGGRGIIDVVNLHNKQIKSLRCYFHKQAQHIRLHKIVTKADQRLTPLNLQDMDTQMHERVTNDKQKMAAWQQKSLHGRHYHDLQQVHVDKIASNAWLQRGELFPETEGFMLAIQDQIIETRNYQKYIIRTPNFPSDACRHCHGSPETIQHITGACRSIAQTDYKHRHDQVAAIVHQYIAFKHNFIIQKVPYYKYQPETILENSNIKIYWDRTIITDKTIHHNRPDITILDKINKTAFFIDIAISNTHNLLTTHTEKIAKYTDLSIEIKKQWQISTVRTVPIILSTTGVIPKTLHTSLKTLDIHPSTYTLMQKAVILNTCRIVRKFLSST

SEQ ID NO: 33018 - protein, 1388 aa, Ptilodon capucinus
MELRSRVIIKGPQPGGDRRGAPGADAGCLSMRSIGGRGLNRRVSTENNATADTSPSSPISSTHSLFQSPSSSPHSFNNISPRSSLITPTSVDVAQEAAALIPEPTADAKRTRRKWSHDMNVFIWRTYLILTNLETINNRTFLGPLHEKFVQKFPTMQASKQRIGDQRRAILRNNLLTQETLDTIKTEVEIELQQTALAPTPHDSITQTTQSTDSRTRMKWTDDLNEALIKCYYEETELERNMTANRKKVRVSFIALYPHLSHLSEQRISDQRRAIMNNRYINSTRLQEIRRQVERTLNLTTQCTSTHTNVEQNEPEERITIQSQECTQPHNFHASTQPHISISNTETITNSQTHSHTHAHTHSHTTSQRNQHRNNTNQTNEENIKDRFHEVLRIFMDTDPTTRPYIPKQKTSKKLSQIICVINTHILPESLSNEHDFVTTQTIIYSAAYTAATCNGTKIKDNQNTLQRNSNRIPAWQRRLKNKIETLRKDIGRMTQYIQGNRNRKLTDYVENIKHKHRIHSQHEEPNLTDTQYLDTLKQKLNAAASRLRRYMNCTHRKEQNIKFINNEKQFYRALTLSTQNTQTSTHQPTTAPEPAEMHRFWSNIWANPVLHNRNAEWLNMDSDSDRINVMEFDHISQDTFVAVLNRCHNWKAPGTDHLHNYWYKKFTAAHPILHKHINEFIQNPSTMPQYITQGVTYMIPKDTDYHNPAKYRPITCLQTIYKILTSCIAELIHVHITSNNILAEEQKGCRKRSQGCKEQLIIDSVAMLQAYKEKKDISTMYIDYRKAFDSVPHSWLVFILQRYKIHPQIINFLEEAMQHWKTKLKVLGATNNFETSEIAIRRGIFQGDALSPLWFCLALNPLSNMLNDSNQGFIITSEHNHTTLTHLMYMDDIKLYSHTSQALHSLADITQAFSQDIQMEFGIDKCKTFTVHAGKTIPNDYVLESGYCIESLNQNESYKYLGFQQARQIHQKQTKIDIKKKFRHRLNILLKSKLNSRNLIKAVNTFAIPVLTYTFGIIGWPQTDLINLQRIINTTMTAQRKHHPRSCVQRLTLPRIEGGRGIIDITNLHNKQIKSLRNYFHQRAHQSTLHNIVSSADKQYTPLNLHDQNAQRNEHITKDKDKIAAWERKSLHGRHRHDLQQPHVDKNASNEWLRRGDLFPETEAFMIAIQDQIMDTRNYQKFIIRSPNLPTDMCRHCHSSSETIQHITGACKSIAQTDYKHRHDQVAAIIHQNLAHKYNFILEKVPYYKYQPNAVLENSTYKIYWDRTIITDKTIRSNRPDITFLDKNRKTVYLIDIAICNTHNLLTTHTEKIAKYTDLSIELKTQWQVSTVKTVPIILSSTGVIPNTLHTSLTTLEMHPSTLALAQKAVILNTCRIVRKFLSLTGP

SEQ ID NO: 33019 - protein, 896 aa, Ptilodon capucinus
MTQYIQGNRNRKLTEYVENIKHKHRMHSQHEEPNLIDTQYLDTLKQKLNAAASRLRRYMNCTHRKEQNTKFINNEKQFYRALTSSTQNTQTNTHQPTTTPEPCVMHRFWSNIWANPVIHNSNAEWLNIDSEVIDRINVMEFEHISQDTFVAVLNRCHNWKAPGTDHLHNYWYKKFTAAHPILHKHINEFIQNPSTMPQYITQGVTYMIPKDTDYHNPAKYRPITCLQTIYKILTSCIAELIHAHITSNNILAEEQKGCRKRSQGCKEQLIIDSVAMLQSYKEKKDISTMYIDYRKAFDSVPHSWLVCILQRYKIHPQIIYFLEEAMQQWKTKLKVLGDINNFETAEISIRRGIFQGDALSPLWFCLALNPLSNMLNKSNQGFIITSEDNHTTLTHLMYMDDIKLYSHTPQALHSLADITQAFSKDIQMEFGIDKCKTFTVHAGKTIHSDYVLESGNCIESLNQNETYKYLGFQQARQIHHKQTKIDIKKKFRHRLNILLKSKLNSRNLIKAINTFAIPVLTYTFGIISWPQTDLMNLQRIINTSMTAQRKHHPRSCVQRLTLPRIEGGRGVIDITNLHNTQIKTLRNYFHQRGNQSALHKIVSSADKHYTPLNLHEQNAQRNENLTKDKDKIAAWERKSLHGRHRHDLQQPHVDKNASNEWLRRGDLFPETEAFMIAIQDQIMDTRNYQKFIIRSPNLATDMCRHCHSSSETIQHITGACKSIAQTDYKHRHDQVAAIIHQNLAHKYKFLIEKVPYYKYQPNAVLENNTHKIYWDRTIITDKTIRSNRPDITLLDKNSKTVYLIDIAICNTHNLLTTHTEKIAKYTDLSIELKTQWQVSTVKTVPVILSSTGVIPNTLHTSLRTLDMHPSTLALAQKAVILNTCRIVRKFLSLTGP

SEQ ID NO: 33020 - protein, 1389 aa, Ptilodon capucinus
MELRSRVISKGPLPGGDRRGAPGADAGCLSMRSIGGRGLNRRVSTENNATADTSPSSPISSTHSLFQSPSSSPHSFNNISPRSSSITPTSVDVAQEAAALISEPTADAKRTRRKWSHDMNVFIWRTYLILTNLETINNRTFLGPLHEKFSEKFPTMQASKQRIGDQRRAILRSNLLTQETLDSIKTEVEIELQHIAPTPTSHDSITQTTQSTDSRTRMKWTDDLNEALIKCYYEETELERNMTANRKKVRVSFIGLYPHLSHLSEQRISDQRRAIMNNRYINSTRLQEIRRQVARTLNLTSQSTNTQTNVEQNEPEELIILQSQECTLPLNCHASTQPHISVTNTETIMNSQTHSHTHAHTHSHTTSQRNQHINNTNQTNEENIKDKFHEVLRIFKDTDPTTRPYIPKQKTSKKLSQIIHVLNTHILPESLSNEHDFVNTQTIIYSAAYTAATCNGTKIKNNENTLQRNTNRIPAWQRRLKNKIETLRKDIGRMTQYIQGNRNRKLTEYVENIKHKHRMHSQHEEPNLIDTQYLDTLKQKLNAAASRLRRYMNCTHRKEQNTKFINNEKQFYRALTSSTQNTQTNTHQPTTTPEPCVMHRFWSNIWANPVIHNSNAEWLNIDSEVIDRINVMEFEHISQDTFVAVLNRCHNWKAPGTDHLHNYWYKKFTAAHPILHKHINEFIQNPSTMPQYITQGVTYMIPKDTDYHNPAKYRPITCLQTIYKILTSCIAELIHAHITSNNILAEEQKGCRKRSQGCKEQLIIDSVAMLQAYKEKKDISTMYIDYRKAFDSVPHSWLVCILQRYKIHPQIIYFLEEAMQQWKTKLKVLGDINNFETAEISIRRGIFQGDALSPLWFCLALNPLSNMLNKSNQGFIITSEDNHTTLTHLMYMDDIKLYSHTPQALHSLADITQAFSKDIQMEFGIDKCKTFTVHAGKTIHSDYVLESGNCIESLNQNETYKYLGFQQARQIHHKQTKIDIKKKFRHRLNILLKSKLNSRNLIKAINTFAIPVLTYTFGIISWPQTDLMNLQRIINTSMTAQRKHHPRSCVQRLTLPRIEGGRGVIDITNLHNTQIKSLRNYFHQRANQSALHKIVSSADKHYTPLNLHEQNAQRNENLTKDKDKIAAWERKSLHGRHRHDLQQPHVDKNASNEWLRRGDLFPETEAFMIAIQDQIMDTRNYQKFIIRSPNLATDMCRHCHSSSETIQHITGACKSIAQTDYKHRHDQVAAIIHQNLAHKYKFLIEKVPYYKYQPNAVLENNTHKIYWDRTIITDKTIRSNRPDITFLDKNSKTVYLIDIAICNTHNLLTTHTEKIAKYTDLSIELKTQWQVSTVKTVPIILSSTGVIPNTLHTSFRTLDMHPSTLALAQKAVILNTCRIVRKFLSLTGP

SEQ ID NO: 33021 - protein, 1389 aa, Ptilodon capucinus
MELRSRVISKGPLPGGDRRGAPGADAGCLSMRSIGGRGLNRRVSTENNATADTSPSSPISSTHSLFQSPSSSPHSFNNISPRSSSITPTSVDVAQEAAALISEPTADAKRTRRKWSHDMNVFIWRTYLILTNLETINNRTFLGPLHEKFSEKFPTMQASKQRIGDQRRAILRSNLLTQETLDSIKTEVEIELQHIAPTLTSHDSITQTTQSTDSRTRMKWTDDLNEALIKCYYEETELERNMTANRKKVRVSFIGLYPHLSHLSEQRISDQRRAIMNNRYINSTRLQEIRRQVARTLNLTSQSTNTQTNVEQNEPEELIILQSQECTQPLNFHASTQPHISVTNTETIMNSQTLSHTHAHTHSHITSQRNQHINNTNQTNEENIKDKFHEVLRIFKDTDPTTRPYIPKQKTSKKLSQIIHVLNTHILPESLSNEHDFVNTQTIIYSAAYTAATCNGTKIKNNENTLQRTTNRIPAWQRRLKNKIETLRKDIGRMTQYIQGNRNRKLTEYVENIKHKHRMHSQHEEPNLIDTQYLDTLKQKLNAAASRLRRYMNCTHRKEQNTKFINNEKQFYRALTSSTQNTQTNTHQPTTTPEPCVMHRFWSNIWANPVIHNSNAEWLNIDSEVIDRINVMEFEHISQDTFVAVLNRCHNWKAPGTDHLHNYWYKKFTAAHPILHKHINEFIQNPSTMPQYITQGVTYMIPKDTDYHNPAKYRPITCLQTIYKILTSCIAELIHAHITSNNILAEEQKGCRKRSQGCKEQLIIDSVAMLQSYKEKKDISTMYIDYRKAFDSVPHSWLVCILQRYKIHPQIIYFLEEAMQQWKTKLKVLGDINNFETAEISIRRGIFQGDALSPLWFCLALNPLSNMLNKSNQGFIITSEDNHTTLTHLMYMDDIKLYSHTPQALHSLADITQAFSKDIQMEFGIDKCKTFTVHAGKTIHSDYVLESGNCIESLNQNETYKYLGFQQARQIHHKQTKIDIKKKFRHRLNILLKSKLNSRNLIKAINTFAIPVLTYTFGIISWPQTDLMNLQRIINTSMTAQRKHHPRSCVQRLTLPRIEGGRGVIDITNLHNTQIKTLRNYFHQRGNQSALHKIVSSADKHYTPLNLHEQNAQRNENLTKDKDKIAAWERKSLHGRHRHDLQQPHVDKNASNEWLRRGDLFPETEAFMIAIQDQIMDTRNYQKFIIRSPNLATDMCRHCHSSSETIQHITGACKSIAQTDYKHRHDQVAAIIHQNLAHKYNFLIEKVPYYKYQPNAVLENNTHKIYWDRTIITDKTIRSNRPDITLLDKNSKTVYLIDIAICNTHNLLTTHTEKIAKYTDLSIELKTQWQVSTVKTVPIILSSTGVIPNTLHTSLRTLDMHPSTLALAQKAVILNTCRIVRKFLSLTGP

SEQ ID NO: 33022 - protein, 1041 aa, Ptilodon capucinus
MNSQTLSHTHAHTHSHTTSQRNQHINNTNQTNEENIKDKFHEVLRIFKDTDPTTRPYIPKQKTSKKLSQIIHVLNTHILPESLSNEHDFVNTQTIIYSAAYTAATCNGTKIKNNENTLQRTTNRIPAWQRRLKNKIETLRKDIGRMTQYIQGNRNRKLTEYVENIKHKHRMHSQHEEPNLIDTQYLDTLKQKLNAAASRLRRYMNCTHRKEQNTKFINNEKQFYRALTSSTQNTQTNTHQPTTTPEPCVMHRFWSNIWANPVIHNSNAEWLNIDSEVIDRINVMEFEHISQDTFVAVLNRCHNWKAPGTDHLHNYWYKKFTAAHPILHKHINEFIQNPSTMPQYITQGVTYMIPKDTDYHNPAKYRPITCLQTIYKILTSCIAELIHAHITSNNILAEEQKGCRKRSQGCKEQLIIDSVAMLQSYKEKKDISTMYIDYRKAFDSVPHSWLVCILQRYKIHPQIIYFLEEAMQQWKTKLKVLGDINNFETAEISIRRGIFQGDALSPLWFCLALNPLSNMLNKSNQGFIITSEDNHTTLTHLMYMDDIKLYSHTPQALHSLADITQAFSKDIQMEFGIDKCKTFTVHAGKTIHSDYVLESGNCIESLNQNETYKYLGFQQARQIHHKQTKIDIKKKFRHRLNILLKSKLNSRNLIKAINTFAIPVLTYTFGIISWPQTDLMNLQRIINTSMTAQRKHHPRSCVQRLTLPRIEGGRGVIDITNLHNTQIKTLRNYFHQRGNQSALHKIVSSADKHYTPLNLHEQNAQRNENLTKDKDKIAAWERKSLHGRHRHDLQQPHVDKNASNEWLRRGDLFPETEAFMIAIQDQIMDTRNYQKFIIRSPNLATDMCRHCHSSSETIQHITGACKSIAQTDYKHRHDQVAAIIHQNLAHKYKFLIEKVPYYKYQPNAVLENNTHKIYWDRTIITDKTIRSNRPDITLLDKNSKTVYLIDIAICNTHNLLTTHTEKIAKYTDLSIELKTQWQVSTVKTVPIILSSTGVIPNTLHTSLRTLDMHPSTLALAQKAVILNTCRIVRKFLSLTGP

SEQ ID NO: 33023 - protein, 896 aa, Ptilodon capucinus
MTQYIQGNRNRKLTEYVENIKHKHRMHSQHEEPNLIDTQYLDTLKQKLNAAASRLRRYMNCTHRKEQNTKFINNEKQFYRALTSSTQNTQTNTHQPTTTPEPCVMHRFWSNIWANPVIHNSNAEWLNIDSEVIDRINVMEFEHISQDTFVAVLNRCHNWKAPGTDHLHNYWYKKFTAAHPILHKHINEFIQNPSTMPQYITQGVTYMIPKDTDYHNPAKYRPITCLQTIYKILTSCIAELIHAHITSNNILAEEQKGCRKRSQGCKEQLIIDSVAMLQSYKEKKDISTMYIDYRKAFDSVPHSWLVCILQRYKIHPQIIYFLEEAMQQWKTKLKVLGDINNFETAEISIRRGIFQGDALSPLWFCLALNPLSNMLNKSNQGFIITSEDNHTTLTHLMYMDDIKLYSHTPQALHSLADITQAFSKDIQMEFGIDKCKTFTVHAGKTIHSDYVLESGNCIESLNQNETYKYLGFQQARQIHHKQTKIDIKKKFRHRLNILLKSKLNSRNLIKAINTFAIPVLTYTFGIISWPQTDLMNLQRIINTSMTAQRKHHPRSCVQRLTLPRIEGGRGVIDITNLHNTQIKTLRNYFHQRGNQSALHKIVSSADKHYTPLNLHEQNAQRNENLTKDKDKIAAWERKSLHGRHRHDLQQPHVDKNASNEWLRRGDLFPETEAFMIAIQDQIMDTRNYQKFIIRSPNLATDMCRHCHSSSETIQHITGACKSIAQTDYKHRHDQVAAIIHQNLAHKYKFLIEKVPYYKYQPNAVLENNTHKIYWDRTIITDKTIRSNRPDITLLDKNSKTVYLIDIAICNTHNLLTTHTEKIAKYTDLSIELKTQWQVSTVKTVPIILSSTGVIPNTLHTSLRTLDMHPSTLALAQKAVILNTCRIVRKFLSLTGP

SEQ ID NO: 33024 - protein, 1386 aa, Adoxophyes honmai
MEAGQKRCTLPQAGTSRGDNAGESRPERRVTRSSGRSSYSGGSNVPRPEATRLTDIAEIIISQPSSPISSTHSLFESPSSSPHPFETQIFSDTTSVSSMSVDVVQEANAINPEPTTGNNRARQKWTIEMNMFIWRTYLEITELETKTNGYLDSLHSQFLQQFPQMKVSKQRVGDQRRAIMRNKMLTPDILDSIRDEVCLKLSNSHANTTSAYRTQTTNNSQSRTRLIWTDEINEAIMRAYYTITNLESNTTAYRKQLHKEITENFTELAHVSEQRIADQRRTIIANNRISHQKLEEIRQEVHQNLNTPDTYISQINDPDNNPYEQNVTPENSPTDPIANVQQTSGILESNINAELDQKITDTFKTTLERFITTDPTQRPYIPKQKTSKKLSYIVNFINTNILPEQISEADDYITTQTLIYTAAYSAATCNGTKFKEISSGTQKQNDNKPAWQKRLENKINNLRKDIGRLTHYIQGFRGARLLINVEDIKKRHQHHSQHEEPNTNDEQFLDTLKQKLNTAKARLSRYLNCTRRKKQKTQFSNNEKLFYRQLSIDTQHTHTHNTLNTDLPDAEKFHQFWSNIWNNPIEHNKAAEWIYNDEQTLNDVPQMRFEFIPIDTFTRVIKKTHNWKAPGTDHIHNYWYKKLTSLHPKLHTHINNFIRSPNTMPEFITQGITYMLPKDNDRLNPAKYRPITCLQTIYKILTSCLTELIYQHITEHNLLAEEQKGCRKYSQGCKEQLIIDSVAMKLAIKRKQDITTMYIDYKKAFDSVPHSWLLHILHHYKINPTIITFLNNTMQHWKTKLKLVNCPTQIQTTDIHIKRGIFQGDALSPLWFCLALNPLSNMLKRHGNGFPIPHDQTHTSLTHLMYMDDIKLYSTDTESLHQLADITQKFSNDICMEFGIDKCKTLSVKDGVVVQNDYALDNGDFIRSMNEGSPYKYLGFQQSQQIHQKETKTDLIKQFKHRLNSLLRSQLNSRNIIKSINTYAIPILTYSFGIINWSKTDLQKLQTTISKLMTTHRKYHPRSCTQRLTLPRNQGGRGLIDIINLHNKQITNLRHFFYKRSQDSTLHQAISKTDTRQTPLNLHDTNTQRNEHITDSKQKINAWQLKSLHGRHYNDLQQPHVDNLASNAWLRRGELFPETEAFIIAIQDQVINTKNYQKYIIRRPGSDHCRHCHASPETIQHITGACRSIAQTDYKHRHDQVAAIVHQYLAFQYKLITDKVPYYKYQPQTVMENSDYKIYWDRTIMTDKTIHYNRPDITILNKKDKLVYLIDVAVCNTHNLQSTHTEKIAKYTDLSIEIKTQWQIRTVKTIPIILSTTGVIPKTLHTSLRTLNNKHSPTHIHAAPESCHPQHMSHSSQILVYGLKSSKALGLGPCQNFASSERNLNL

SEQ ID NO: 33025 - protein, 1181 aa, Pterostichus madidus
MVRTRNQNLSGVPEDSGRIASHPGRNTPGNNQGDKMVHVRLEEGTQQPHQNPSTSGNVAEARDAQPMPDELETRKKRFKWTTEINEQLVYTYYLMYKLDTERPTMKDLHSRVIVEQPLVQGKTPQNITDQIRSILKNNRIPAEKLQAIKRKVEIELELHNPPDTEEEDNRAETDIEAHNIVEESPVVMYFEEFNFKFKGMDPASRVKIQKLKTNKNTNKIIDEVNHVIGMHIKSDTNVKDLHDLVYVGALTVLKLHEQKTHNIENGKNNNTKRAPGWETRIKTKIDQLRKDIGSLSNFIRNTVPNQKATRTVSNIMNKYRNNEDTNENEVLDRLKQQLAATAAKLRRYRISYERRQQNTMFTFNEKQFYRQCQKPKENLNQKPTLPSKDNIREYWSALWETQATHKNAIWIREEKRRVQNIRTMYQYEVTEADVKEALRKAANWKSPGPDHVQNYWLKKFTSVHKCPAQCFTKMLEDPATTPAFLTEGITFLLPKTNNPSNKADKYRPITCLPTLYKTFTSIIAKKIYSHLEVNDLLDEEQKGCRKNSRGCKEQLTIDAILTEQVKKNKADLFTTYIDYSKAFDSVPHSWLQEVLKLYQVNDTICGFLCHVMKSWKTSLHLKFGEEDINAGSVCIRRGIFQGDALSPLWFCMALKPLTTMLNNTKKGFALKDSQVQISHFMYMDDIKLYATSRKNLDTLIDVTHKFSKNICMNFGLDKCKLNGMIKGRWVQQENYTGPIVEDEVDVIEAMERGELYKYLGYNQAQGIAQKDTKKHMTNKYVQRINDIMRSKLTARNKCKAINTYATSVLEYSFGIIKWTKTDLYNLDIKTRTTCTKFRSHHPRSAIERVHLPRSDGGRGIPSLPQRHYKQVENLRQYFYKKAETSILHAAIVKADCSLTPMNLANKTYQPLTNTKNKEELIMQWKRKEIHGMYAALLDDENIDKKASTAWLRTSNIFSETEAFNLAIQDQVIATKYYKKAIMKLPNATDDKCRLCGRTRETIEHVISGCSTLAPEEYMERHNNIAKIIHKELLSMYDITVNMPYYKYIPEQVKENEKYKLYWDRIINTDKTIEHNRPDIVLTDKDAKTTYIIDIAVPSPYNVVKKDREKLRNYLPLADEIKRMWKQDKVVVVPIIVGATGEIPKKLHNAIQTLKIKENIYFELQKAAILKTCSIVRRFLSQ

SEQ ID NO: 33026 - protein, 1086 aa, Eurytoma brunniventris
MQEFTCEFPGCERAFPTKIGLGVHRRKAHTDFADQQLVGRVHKKERWTPEEKALLAQKEAKLISEGTKSIHINAELVKVFTRTLEAIKGQRRRPEHKDLVKEYVAKIRRQSKRHSGGSRGRVSTALTESSTPSQVEEVMSPNDSIPPAPTATEQLLLQGSHDIIHVPLGPPEARSDGVECQGVELSDEEFEDASPGRDSELPLDVFQRHFREVQAPKDDDANQQRLHTICQMTTWRSKEEVKQELDLFLLELLPNHRRERGGRRPPIPPPPRNRVEKRRQEYKKVQDLWRKDKTKCVKRILNEDMAQSAGVPKDLMEPYWTATFTKGSTSAPVLPPPTSTFESIWEPITPDEIKGHFPPHNTAEGLDGVKVKDLKRLPLWVLSEVFNLFMWCGSLPERLCASRTSLIPKKNGANNPKDFRPIAVTSVLVRTFHKVLAERLKIIPLDPRQRGFREADGCAENVMLLDMTLRFHHSRKRKMFFALLDMAKAFDSVSHAAIKEILRTKGLPEGFIEYFMKVYETSYTILQHGDWESGKIHPTCGVKQGDPLSPPIFNFVIDEMLLRLPEEIGVDVDGLKVNAMAFADDLNLLANTETGLQELINHCCGFLGECGLRANPDKCITGAIKTIPKEKRTIIDPQTKFKIGSAVIPSIKRSDHWTYLGIEFSAQGRIFSDAKPKLVKNLELLTKAPLKPQQRLWALRVVVIPGLLYQGALGVTTLGYLRSLDCVTRNYVRRWLHLPNDCPNGYIHAAIEDGGLAVQSLRWKSIIDRLARLKALQSSNNISGLESGRYIIGEMSIAENRLKDADGRIMTTGVMLKDFWKGILYKSFDGRPLCDSGKTGGQHRWVGEPTRFLRGADYINCIKARINALPTAARVARGRLKEKQCRAGCGDVETLNHVLQFCHRTHDARIGRHDAIIKYIAKHLEKSGHVVVQEPELVVEDSKLKPDLVASKDGQTVVLDAQVLGDQRDKKLAHEDKIRKYGNWKVKREVQGLTGSTSIRVSSITLSWRGIWCPESVNDLVAWGIIAKRDIKVISSRVLIGAVAGFRKFMERTSVRKGVIGAQAIAGEPSTRNIRRRFRQERIGIG

SEQ ID NO: 33027 - protein, 986 aa, Eurytoma brunniventris
MVKGVHINAELVKVTTRSLEAIKGQRKRADYKKLVKEYLAKLQDPDDLQVESIRTGIQGTSLSHDSRANTHSTPVTEPISDDEESARDEFEDALPGRDSELPPDSFQKHFAQLEPPKGDNALEHRLHTICKMTTWRSQDEVKHELDLFLLELLPPKVPVTIQPDRLRRPPEPRNRVERRRQEYKKTQHLWRKDKSKCIQRILSEDLAQSEGLPREIMEPFWTATFTKGSVSAPVLPPPTNSFEGIWEPINPVHLKGCFPPLNTAVGLDGVSVKDLKRLPLSLLAEIFNLFMWCGSLPERLCASRTILIPKKKGANNPKDFRPIAVTSVLVRTFHKIMAERLKIIPLDPRQRGFREADGCAENIMLLDMALRFHHARHRKMFLAMLDMAKAFDSVSHAAIEEVLRSKGLPEGFIKYFMRVYKDSYTILQHGGWQSGKIHPTCGVKQGDPLSPPIFNFVIDEMLKRLPDEIGVDLDGLLVNAMAFADDINLLANTEAGLQELINVACDFLGECGLRANPDKCVTCAIKTVPKEKRTIVDPKCTFKIGSAKIPAVKRSDEWVYLGIKFNAQGRVLSDAKPKLVNDLELLTKAPLSPQQRMWGLRVIVIPGLLYRGSLGASTIGYLRSLDCVLRAYSRRWLHLPNDCPNGYFHASIEDGGLAVQSLRWKANLDRLARLKALQHSNNISGLESGRYLIREISKVEERLKGGDGIVINTGEMLRDFWKEALYRSFDGRPLCDSGLIKGQHSWVGEPTRFLRGADFVNSVKARINALPTAARVARGRLKERHCRAGCGDVETLNHVLQFCHRTHDTRIKRHDAVTDYVAKSLTKKGYAVSKELEIVVDDQKLKPDLIATKDGETLVLDAQVLGDQRDKKLAHEDKIRKYGNWRVKGRIKELTGSSTIRTSSITLTWRGIWCPESVHDLVAMGVIGPKDLKVLSSRVLIGAVVGFRRFNERTSMRNGVLGGGNTGEPTTRDIRRRFRRVPEGVG

SEQ ID NO: 33028 - protein, 995 aa, Eurytoma brunniventris
MINQEMLKVSTRTLESIKGQRRNPDHKSLVKKYLERIRETEDLQVEVGRTRAGDRRRNMSAPTQVEDMTPSTEIPSPEHNPSELHGSQEPLDDSQEEVFEDALPGRDSELPMDSFQRHFVGLEAPKEDNAHSHRLYTICQMTTWRSKEEVKQELDLFLLELLPNRKANKSCRTTTNPPEPRNRREKRRQEYKKVQDLWRRNKSKCVKRILKQDLAQSEGLPREVMEPYWTATFTKGCTTAPILPPPQNIYETIWDPIRPGDLKGNFPPHNTAVGLDGVSVKDLKQLEPWLLAEIFNLFMWCGSLPERLCASRTTLIPKKNGANNPKDFRPIAVTSVLVRTYHKILAERLKIIPLDPRQRGFREADGCAENVMLMDMTLRYHHSRHRKMFFALLDMAKAFDSVSHAAIKEILISKGLPEGFIDYFMRVYQDSFTILQHGGWESGKIHPTCGVKQGDPLSPPIFNFVIDEMLKRLPDEIGVDVDGLLVNAMAFADDLNLLANTEAGLQELIEVCCGFLGECGLRANPDKCITGAIKTIPKEKRTIIDPGTRFKIGSAVIPSMKRTDEWTYLGISFNAQGRVISDAKPKLAKQLELLTRAPLKPQQRMWALRVVIIPGLLYQGALGVTTLGYLRSLDAMVRDFVRRWLHLPNDCPNGYFHAAIEDGGLGISSLRWKAMLDRNTRLKALQSSNNISGLESGRYLVGEISKAENRLKDNTGRIMNTGKMLQNFWKEKLYQSFDGRPLGDSDRVKGQHRWVGEPTRFLRGADFVNCIKARINALPTAARVARGRLKDKHCRAGCGDVETLNHVLQFCHRTHDARIKRHDAVVNYVGKQLEKKGYAVLQEPEFVIEDQKLKPDLVATKEGATLIIDAQVLGDQRDKKMAHDDKKRKYGGWKMKREVQARMGSVSTRVTSVTLNWRGIWCPESVQELVEYGVIGARDIKTISSRVLIGAVAGFRKFNERTSVRTSVIGVQERSGEPTTRTIRRRFRDERVGIG

SEQ ID NO: 33029 - protein, 1026 aa, Eupelmus urozonus
MKAQRRREDYKSLVQEYVGRLADSDDLQVESVRRGLRSLSLRAPSHEVAELGGGLRSLSLQAPSQELAELEAEGINLATRALSEEQRRSEESQQNIPLQSPPQSSRDNEPSEDEGGHSSDDAFEDAEPGRPSALPFDVFQRHFSQLPVPQNEEFNARRLHTICKMTEWRSKEEVKLELDLFLLELFPPPRPKTKPPKSTVDTSAAPNRRVRRREDYKKMQDLWRRNKTKCIKRILNEDTAQSECLPREDMEPYWTATFTQGSTSAPLLPPAQTTFQGIWAPIKPIEIKGMYPPYNTSPGPDGVTVKNLKRLPPSMLAEVFNLFMWCGSLPERLCASRTALIPKKKGANHPKDFRPITVSSVLTRTFHKVLAERLKIVPLDPRQRGFREADGCAENVMMLDMAIRYHHDRHKKMFFSLLDMAKAFDSVSHNAIREILKSKGLPDEFIEYFMTMYRESFTVLQHGDWKSGKIHPTCGVKQGDPLSPPIFNFVIDEMLRRLPDEIGVDLDGLKVNAMAFADDLCFMATTDSGLQELIDVATSFLSKCGLRANPEKCITGAIKTIPKEKRTVIDPSCRFKIGGAVIPSLKRTDEWSYLGIKFTARGRSYSDAKPKLLQQLELLTKAPLKPQQRLWALRVVVIPGLLYQGALGRTTLGYLRSLDCVTRSYSRKWIHLPGDCPNGYIHAAIEDGGLGVQPVRWKALIDRLARLKKLQSSDYLIGLESGRYITKEVSQVENRLKGTDGRVVNNSEMLRELCKESLYKSFDGRPLRPSGDVKGQHRWVGEPTRFLKGADYVNSLKARIAALPTAARCARGRLKDKHCRAGCGDVETLNHVLQFCHRTHLSRIKRHDAVTSYVAKNLRKKGYEVLEEPEYMIEDNKLKPDLVATKEGVTVVLDAQVLGDQRDLRLAHKDKVDKYNGWRLKRQIETSTGSHHIDVSSITLNWRGLWSPESASDLIRLGVISGRDLKVLSTRVLIGAIAGFRVFTGSTRMKKGRERNRNEVIGRTTSGAVTTRNIRRWFRQDKTGVG

SEQ ID NO: 33030 - protein, 1032 aa, Eupelmus urozonus
MARKEAELLHRGAKPSEINSELKKCTARTLESLKGQRRRQDYKTLVQEYVARLKDTEDLQVESVREGIERTTNTTRSTRTTRRGAATNTQLPEPTQRTLRARQNTAARVQESPQEEEASNGEDSSDELFEDAEPGRDSVVPPDVFQAHFKELRPPEIEEFNALRLHTICKMTEWRSKEEVKQELDLFLLELFPPPQPKIRQSTNRPGGPTGTGSRVKRRRRKEEYKKVQDMWRKNKSKCVKRILSEDTAQGEGLPRDEMEPYWTATFTQGSTSAPVLPPAQTTFGEIWTPMKPKDIKGNYPPHNTTAGPDGVTVKDIKRVPLWILAEVFNLFMWCGSLPERLCASRTLFIPKKKGANHPKDFRPITVSSVLLRTFHKVLAERLKVVPLDPRQRGFREADGCSENVMLLDMALRYHHERHRKMFFGLLDMAKAFDSVSHKAIEEVLKSKGLPEGFVRYYMDMYRDSFTVLQHGGWESGKIHPMCGVKQGDPLSPPVFNFLIDEMLRRLPDEIGVDLDGLKVNAMAFADDISLMASTDSGLQELINVACDFLGKCGLRANPEKCITGAIKNVPKEKRTVIDPSCRFKIGSAVIPSMKRTDEWVYLGVKFTAQGRVFSDAKPKLIQNLELLTKAPLKPQQRLWALRVVVIPGLLYQGALGRSTMGYLRSMDCTIRAYARRWLHLPGDCPNGYFHAAIEDGGLGIQPIRYEAMLDRHARLKKLLTSNYITGLESGRYITREMSAVENRLKGSDGRIINNSAMLRDLCKEKLYRSFDGRPLQVSSEVKNQHRWVGEPTRFLRGADYINSIKARIAALPTLARVSRGRLKEKHCRAGCGDVETLNHVLQFCHRTHINRIRRHNAITQYMAKQLSKRGFTVIEEPEYVVDDLKLKPDLVVTKDGRATVLDAQVLGDQRDMKLAHMDKVKKYGNWRLKSKIMEATGTENVQITSITLNWRGLWGPESARELLELGMMQRKDVKILSSRVLIGAIAGFRLFNESTRMKRRRREGVIGEGTTGAITTRNIRRWFRRDRAGIG

SEQ ID NO: 33031 - protein, 1140 aa, Eurytoma brunniventris
MVILWLRWKVGRLMGHRPPWALGVTSPLGFLPVGPNRKQASDKNHGRASACPAPANEAETNSTNPGQVMQEREGFACEFPGCDRSFPTKIGLGIHRRRAHADFADQRQVEKLQNKKERWSDEEKALLAKKEAELLFGGTKSLHINSQLVKCSSRTLESIKGQRRRQDHKDLVKEYLRRLKVAEARRGRSRGEVQASVGRSSPSSQVEDTLTSLAGTPSLGSQPSEEHAIQETEDEGEDFQDDMFEDALPGRDSGLPPDGFQKHFMELRVPDGGDANCQRLHTICKKNVTSWRSKEEVKLELDLFLLDLFPPKPATNKSGQRRPPEPKNRRERRREEYKKVQDLWRKDKSQCVKRILSEDLAHSSGLSREVMEPFWTATFTGGSHSAPVLPPPEKTFDGIWTPIMPTEIKGSFPPHSTAVGPDKVSVKDIKKVPHWLLAEVFNLFMWCGSLPERLCASRTNLIPKKKGATNPKDFRPIVVTSVLTRTFHKVLAERLKIIPLDPRQRGFREADGCAENVMLLDMTLRFHHSKHRKMFLAMLDMAKAFDSVSHAAIEEVLRTKGLPEGFIRYFMQVLKDSYTVLQHGGWESGKIHPNCGVKQGDPLSPPIFIFVMDEMLKRLPNEIGVDVDGLKVNAMAYADDLNLLANTEAGLQELINTSLEFLGKCGLRANPDKCVTCAVKTVPKQKMTVVDPNCKFKIGSAIIPSMKRTDEWVYLGIKFNAQGRILSDAKPKLVQQLELLTKAPLKPQRRLWALRVIVIPGLLYQGALGASTLGYLRSLDSVIRHYARRWLHLPNDCPNGYFYAAIEDGGLGLQSLRWKAMLDRLARLKALQASNNITGLESGRYLVGEMSIAENRLKDGDGRVINTKEALQQFWSRTLYKSYDGQPLSDSGIIKGQHRWIGEPTRFLSGADYVNCVKARINALPTAARVARGRLKERHCRAGCPDVETLNHVLQFCHRTHDTRIKRHNAVLDYTEKQLSKKGYTVLKEPEIMIEDQKLKPDLVATKDKATLILDAQVLGDQRDKRLAHIDKKKKYGSWQVKRKVRELTGADTVEVTAVTLNRRGIWCPDSVHDLIRLGVIGPKDLKVISSRVLIGAVAGFRRFNMRTQVLNGIVGGRTAGEPSSRDIRRRFRLDRAGVG

SEQ ID NO: 33032 - protein, 1116 aa, Eurytoma brunniventris
MEAVTGLTNPSLVGDGKEGFPCEFPGCERFFPTKIGLGVHRRRAHTDFADEQQVGKVHKKERWTDEEKALLARKEAELLCSGLKSVHINAELMKVTTRSLEAIKGQRKGQGHRQLVKEYVEKLKNPTDLQVESIRRKIDSALTISADSQVEMVGGEISRLSIGSSAPTQVEDDVAQEAMPPSEPARSSQPFSQGSHSNTGSLTVPREMDPAESDSSGDEFEDALPGRDSELPLDIFQKHFIELQPPDNDDVFEHRLHTICRMTTWRSKEEVKGELDLFLLESLPNKNRTGGNRDQPPRPPDPKNRRQRRRQEYKKVQDLWRKDKSKCIKRILNEDLSQREGLPREIMEPYWTATFTKGSTSAPVLPPPTTSFETIWEPILPSDIKGCFPPLNTAVGLDGVSVKDLKCLSNWALAEIFNLFMWCGSLPERLCASRTTLIPKKNGANNPKDFRPIAVTSVLVRTFHKVLAERLKIVPLDPRQRGFREADGCAENVMLLDMALRYHHTRHRKMFLALLDMAKAFDSVSHAAIEGILRSKGLPEGFITYFMTVYKNSYTILQHGGWESGKIYPSCGVKQGDPLSPPIFLFVIDEMLKRLPDEIGVDLDGLLVNAMGFADDINLLANTEAGLQELINVSCDFLGECGLRANPDKCLTCAIKTIPKEKRTIVDPGCTFKIGSAKIPSVKRSDEWVYLGIKFSAQGRILADAKPKLCKQLELLTKAPLKPQQRMWALRVMVIPGLLYQGALGSSTIGYLRSLDCVIRSYVRRWLHLPNDCPNGYIHASIEDGGLAIQPIRWKAMLDRLARLKALRDSNNITGLESGRYLIGEISIAENRLKSGDGTIMNTGEMLRDFWKEALYRSFDGKPLSDSARTKGQHRWIGEPTRFLRGADYVNCIKARINALPTASRVARGRLKERHCRAGCGDVETLNHVLQFCHRTHDTRIKRHDAVVDYVAKSLTKRGFAVIKEPEVVVEDQKLKPDLVATKEDETLILDAQVLGDQRDKKLAHEDKKKKYGNWRVKRKIQELTGSKLVKVTSITLSWRGIWSPESVHDLITLGVIGPKDLKVVSSRVLIGAVAGFRRFNERTTVRNEVIGARKTREPTSRDIGRRFRKEQVGVG

SEQ ID NO: 33033 - protein, 855 aa, Eurytoma brunniventris
MTTWRSKEEVKQELDLFLLELLPPKRSMTSGRNRPRRPPEPKNRVERRRQEYKKVQHLWRKDKSKCIQRILSEDLAQSDGLPREVMEPFWTATFTKGSTSTPVLLPPTNSFESVWAPINSTDIKGCFPPLSTAIGLDGVSVKDLKRLPLWVLAEIFNIFMWCGSLPERLCASRTTLIPKKKGANNPKDFRPIAVTSVLVRTFHKIMAERLKIVPLDPRQRGFREADGCAENIMILDMALRYHHAKHRKMFLAMLDMAKAFDSVSHAAIEAVLRSKGLPEGFIAYFMRVYKDSYTILQHGGWESGKIHPTCGVKQGDPLSPPIFLFVVDEMLKRLPNEVGVDLDGLLVNAMAFADDINLLANTEAGLQDLINVSCDFLGECGLRANPDKCITCAIKTVPKEKRTIVDPKCTFKIGNATIPAVKRSDEWVYLGIKFNSQGRVLSDAKTGLIKDLELLTKAPLTPQQRMWALRVIVIPGLLYRGALGASTIGYLRTLDSVLRTYSRRWLHLPNDCPNGYFHASIEDGGLAIQSLRWKANLDRLARLKALQNSSNISGLEKGRYLIREMSIAENRLKRGDGSVINTGEMLKDFWKEALYKSFDGRPLCDSGKIKGQHSWIGEPTRFLRGGDFVNCVKARINALPTASRVARGRLKERHCRAGCGDVETLNHVLQFCHRTHDTRIKRHDAVTDYVSKSLTKKGYVVMKEPEIVVEDQKLKPDLVATKDGETLVLDAQVLGDQRDKKLAHEDKKKKYGNWRVTGRIREMTGSASIKVTSITLNWRGIWCPESVHDLVGMGAIGPKDLKVLSSRVLIGAVVGFRRFNERTAMRNGACRVGNNGEPTTRNIRRRFRKLPEGVG

SEQ ID NO: 33034 - protein, 1143 aa, Anisakis simplex
MWNEVKAEFEKSHRSRTKGALQAKWKCVKSLTHSRTNTPCRLDQSQAAPRAESAIINTPQVLPVTEEENSEQRECSFSEDPQYWAFRRAFYGYFRWAVNGFDREPLKRVGRNCPKKLFAYADSLVGSAFAAFGPNQSEIGRLNGLVYAAGRTIYQFWKDEVSRSKQGERNWFRTAAKEQKEIDGLIRKIEHELKRRKEKRPPSKRERQIIKTLVITLGTRSTKELEKRLEQQRQRLMLLNTRISLREQEKRRKSLRTRFKNTPSLKILPEDAKGNKPEGPSMQSILDFWKPIIGRKVESKPDDVEILRRWKDEQRRNYQERERVGSPELEEAFSEAVRKMRPWKAVGPDGIHAFWWKSLPTAKKLLGQLTVKWLETGKITGGWLCRGRTVLIAKKGDLSKPENYRPITCLNTCYKLVTAVMNTVIIKHLEKGNAIASNQRALRPREWGCTHALLLDKAIITDAMSQRQSPISVAWVDYRKAFDSVSHDYLRWVLEAVGIPKAIGLALSRLMKDWQTRFEVSMAGSKKGNVKSQRMDVLNGIFQGDSLSPTLFILCVSPISYALNQTVTPCISSSGWSAGYGFKLGHQFYVDDLKLYARSPAQLEGLLAIVSETSKVMGLQLNRSKCAVTHYDPALGPAPTITQSGEDIEQGGIPLLGFRCTYKYLGIEQRLLNDPGTLDNVEAKFLEAAKTIFSSNLSWCQMATAYNTIAIAGLRHVYANSNAGASKLKAALARARALDTKVRSILKVCKVRFKASCAERLYVGRDEGGCGLSSAEEALEDSIVATWCYLATNPDLAPQHHLFQKLTERGKRTPEGDALKIMAMYGIKPVTDVRLRKVTINELDFNNASQLHRHLRDAFQKKRAEKHLNGWKEKAMAGRILRDATIDRYLSTLWIRKGCISGRNLRDVLAVQENTLLARASPTAQGGNQSNTCRCCHAAPETVQHITNACTHWLPNLYVERHDAVARNLYYSLCTRYGLPPTHYSNQVPSVLENEHCKILWDTELQTKAKMKHRKPDIVVFDKDEGRISVFEVSVAFATGMDKQRELKINRYTVNSTELPDELNPPYPPGTNLIGDLQAVYKQRVDFVPVIVGSCGEYLSVVKEDLKRTLKMRSEALDLLLERMARSAVLGTARIVRAHMACP

SEQ ID NO: 33035 - protein, 949 aa, Crithidia expoeki
MWSVRNVYRAQQKAAKSRPRQHTRGPGGHRHRGGNTATQNSTAARVRTHDRGPKVGVDTPQKHSGTRETRVEDMVPIGGPGATGLHGGFRRHTAPEADSPHQPGAELPLQARAGRRGRGRGGRRTLIGTRGDTLHTGEARAGNPADPAGMERQAADEEVDPQPAAAGSRPRPKSPHRNTDEFFPPKKGQSLEEKLHRRILHQISLGALGKAARTLFNTQLPRAHASEVIEQLRELHPQEDPSSYPRPPEVPFPYGLKPGKVKKVILQRLGRAAAPGLDGWTRELLIPVAENTLLLQELTTVIQDILAEKVSPSFAYRLRAYVVHPFRKEAGSNKVRPITPESVLLKIAFHIALETVEKSFRDVFRGWQFGVWGDAAAAVKRIRAAYASVSADTLVALDAANAYNRLSRRFALEAFYGHKGLRSAFGVVDLALGEPAALGLYEKGRRTHELASTSGVRQGMVLGPLLFATAMAKILGPVLPKHPATRVTAYLDDLTVVGPRAAAQAFLDEAGPLLSEAGFDINPAKSHYLSKVAAPMPVLVAGVPVPIASGVVRILDAGFLGSGAPVEEWVWEKMGPYNAYFDALEDERLPRQARLTLLRVSTLPRLAFLLRTHAPQELERSAAGFDDRVLRVLSVILGGADLDETARLIARMPLSMGGLGLRSQASIAQFACDCVGRKNLQHEKTSVVDNDVRKALFSLLREPALAIVNANAAPGATRALADPSVQLSDFAFEVLVRQRLLLRVLRPGVRCPCGKDADNAHVNVCPAIPGGPRIARHNRVLQAIDGWAKQLGLSTAVEPRAGTENRERLDLTIATARGLFATDVVITYPARSQKEGQGPPPGAAALTERRGQSALQQSHAEKKRKWANWALEKSADFAPISLESTGGVHRESLEWMLAVAGSAPFPYSARTALSELLSAICQAVHVGNAFLFATVKHHYAKVLLRSGAS

SEQ ID NO: 33036 - protein, 1048 aa, Ormyrus nitidulus
MATGTCGLPTRSYLNLVGMRKTNKPRMKGRGSSDSSAATSGTRQLSEAADSEQFDCEFEGCGQSFTTVTGRGVHYSRAHKDWYDARCLQKVSVKARWSQEEKRLLAKKEAELIIRSEREAFDCKFMNQLLQRLFNDRTIEGIKGIRRRLSHKTRVEQYLTELRLQEVEDELPQSPQNQDELNSFEREAREFLYNLEPLTSDGFNADKLQNICSRVMDITKEDLYDEVSLYLRETFPASSSKKGERKKPLDSGRLTKRQARRAEYAKVQDLWKKDRERCWRMVESEQLNEPATVPKDIMLPFWEAVMSKNTGLAPNIRKADETLDELWRPIKELEVRQAFPKRKTAPGPDGMSARILRSVPLSILTRIYNIFLICGQLPAHLLESRTTLIPKKKDASAPGDFRPITVSPVMVRCYHKVLANRMKKVELDDRQRAFRNTDGCSDNIYLLDLSLRYHRQKHLPLFLALLDVAKAYDSVSFEALEEVMYAKGLPVPMIEYIMSVYEASKTRLEHGGWISELIHPTCGVKQGDPMSCLLFNFVIDIMLRKIPDDIGVAISNLHVNIMAFADDLVLMARTKAGLEDLIKITSDYLYTAGLEVNAGKCNSVAIKSIPKQKKVAVDASCSFSVRGRPIPALKRSEQWKYLGVPFTPEGRICHNIRTELKTKLEKLTKAPFKPQQRLWILRHAIVPATLYHLTTGSVHLGLLRSLDRDIRRAVRSWITLPNDCLNAYFHSDVKDGGLGVPSLRWIAPLHRRERLLVLEGSSYIFGQASDNFLRKEKEAADKRLQDQGENLFTRENIANRWAKLLHGSIDGVPLKDSRLVKSQHQWVSDGTRFLSGRDFINSCKLRINALPTKTRTTRGRAENRLCRGGCGAVESLNHVVQHCHRTHGVRIKRHDAIVQYIARNLRKKEWRVEVERDFQSEEGRRKPDIVASKEGRCLVLDAQIVSEQSDLNGANRNKVSKYKDNRSLLTSIKHHHSANNINVLGVTLNMRGVWSKTSADSLIAEGLLTASDIKVISSRVIVGGIVAFNQFNKTTSISTNRRTAGAGR

SEQ ID NO: 33037 - protein, 1048 aa, Ormyrus pomaceus
MATGACGLPTRLYLKQVGMRKTNKPRMKGRGSSDSSVATSGTRQLSEAADSEQFDCEFEGCGQSFTTATGRGVHYSRAHKDWYDARCLQKVSVKARWSQEEKRLLAKKEAELIIRSEREAFDCKFMNQLLQRLFNDKTVEGIKGIRRRLSHKTRVEQYLTELRVQEDEDELPQSPQNLDELNNLEREAREFLKNLEPLTSDGFNADKLQNICNRVMDITREDLFDEVSLYLRETFPSSSSERKERKKPLESGRLTKRQARRAEYAKVQDLWKKDRGRCWRMVESEQLNEPASVPKDVMVPFWEAVMSKNTGLAPNIKKADETLDELWRPINELEVRQAFPRRKTAPGPDGMSARILRSVPLQILTRIYNIFLICGQLPAHLLESRTTLIPKKKDASAPGDFRPITVSPVMVRCYHKVLANRMKKVELDDRQRAFRNTDGCSDNIYLLDLSLRYHRQKHLPLFLALLDVAKAYDSVSFEALEEVMYAKGLPVPMIEYIMSVYEASKTRLEHGGWVSELIHPTCGVKQGDPMSCMLFNFVIDIMLRKIPDDIGVAISNLHVNIMAFADDLVLMARTKAGLEDLIKITSDYLYTAGLEVNAGKCNSVAVKSIPKQKKVAVDATCSFTVRGRPIPALKRSEQWKYLGVPFTPEGRICHNIRSELKNKLEKLTKAPFKPQQRLWILRHAIVPATLYHLTTGSVHLGLLRSLDRDIRRAVRTWITLPNDCLNAYFHADVKDGGLGVPSLRWIAPLHRRERLLVLGESSYIFGRASDDFLKKEKEAADKRLQDQGENLFSRESIANRWAKLLHGSIDGVPLKDSPLVKAQHQWVGDGTRFLSGRDFINSCKLRINALPTKTRTTRGRGENRLCRGGCGAVESLNHVVQHCHRTHGVRIKRHDAIVQYIARKLRNKEWRVEVEREFQSEEGMRKPDIVASKEGKCLVLDAQIVSEQSDLNGANKNKVSKYKNNRSLLTSIKQHHSANNIIVLGVTLNMRGVWSKASADSLITEELVTASDIKIISSRVIVGGIVAFNQFNKTTSISTNGRTAGAGR

SEQ ID NO: 33038 - protein, 1028 aa, Ormyrus pomaceus
MRKTNKPRMKGGGSSDSSVAALATRNLSEAANSEQFDCEFEGCSQSFTTVTGRGVHYSKAHKDWYDARCLQKKSVKARWSQEEKRLLAKKEAELIIRSEREALDCKFMNQLLQRTFNERTVEGIKGIRRRLSHKTRVEQYLTEFREQEVEQEPPQSPQDPEEQSKFERDARDFLYNLEPLTYDCFNAEKLQSICNRVMGTTREALFEEISLYLRDTFPSSRRKERAKPPVSGRLTKRQARRADYAKVQDLWKKDRGRCWRMVESEQLHEPATVPKETMIPFWKAVMSKNTGLAPNIRKADVTLDELWRPIKDLEVRQAFPRRKTAPGPDGMTARMLRSVPLPILTRIYNIFLICGQLPAHLLESRTTLIPKKKDASEPGDFRPITVSPVMVRCYHKVLANRMKQVELDDRQRAFRNTDGCNDNIYLLDLSLRYHRQKHLPLFLALLDVAKAYDSVSFEALEEVMYAKGLPVPMIEYILSIYEGSTTRLEHGGWISELIHPTCGVKQGDPMSCLLFNFVIDIMLRMIPDDIGVAISNLHVNIMAFADDLVLMARTKAGLEDLIKIVSDYLYTAGLEVNAGKCNSVAIKSIPKQKKVAVDASCSFSVRGRLIPALKRSEQWKYLGVPFTPEGRICHNIRGDLRTKLEKLTKAPFKPQQRLWILRHAIVPATLYHLTTGSIHLGLLRSLDRDIRRAVRSWITLPNDCLNAYFHSDVKDGGLGVPSLRWIAPLHRRERLLVLGESSYIFGQASDDFLMKEKEGAEKRLQDRGENLFSKETIANRWAKLLHGSIDGVSLKDSRLVKSQHQWVSDGTRFLSGRDFINSCKLRINALPTRTRTTRGRAENRLCRGGCGAVESLNHVVQHCHRTHGVRIKRHDAIVQYIARSLRNKQWRVEVERDFETEEGRRKPDIVASKDRRCLVLDAQVVSEQTDLNGANNRKVSKYKENRSLLSSIKQHHSANNIEVLGITINMRGVWSRTSADTLITEGLITVSDIKVISSRVIIGGIMAFNQFNRTTSTSASRRTAGAGR

SEQ ID NO: 33039 - protein, 1030 aa, Eurytoma adleriae
MRKTNKPRMDKGRGSTDSSVTNAEPRQPSQAANSDVFECEFEGCGRSFTTATGRGVHYNKAHKDWYDARVLAKGSVKARWSLEEKRLLARKEAELIIRSEREQLDCRFMNQLLQQTFDERSVEAIKGIRRRLSHKTRVEQYLTEFRVAAEDEDPPIAGNPRDESALTLKVREYLHGLEPLTSEGFNGGRLQNICSRVMNITNEDLYEEISIYLRETFPASPRNAKRRPTTSKRLTRRQARRADYAKVQDLWKKDRGRCWRTVESEQLQEPATVPKEVMEPFWRTVMSKNTGLAPNVNKADVALDHLWGPISGIEVRQAFPDRKTAPGPDGMSARILRSVPIPILTRIFNVFLICGRLPEHLLESRTTLIPKKRDASAPGDFRPITVSPVMVRAYHKVLANRLKQVELDDRQRAFRNTDGCSDNIYLLDLALRYHRQKHQQLFLAMLDVAKAYDSVSFEALEEVMYAKGLPVPMIEYILSVYEASTTRLEHGGWISDLIHPTCGVKQGDPMSCLLFNFVIDIMLRMIPDDIGVSISNLHVNIMAFADDLVLMARTKAGLEELLKIVTEYLYTAGLEVNAGKCSSIAIRSIPKQKKVAVDATCTFSVRGRPIPALKRTEQWKYLGVPFTPEGRICSNIRADLKEKLSKLTKAPFKPQQRLWILRHAIVPATLYHLTTGSVHLGLLRSLDREIRRAVRSWITLPNDCLNAYFHADIKDGGLGVPSFRWIAPLHRRERLLTLQKSSYICGRASDDFLKKEMDATEKRLLDQGVLLQKNADIGDRWAKLLHKSIDGVPLKDSRLVKSQHRWIGEGTRFLSGKDFINSCKLRINALPTKSRTTRGRAEDRHCRGGCGAVESLNHVVQHCHRTHGMRIKRHDAVVQYIARSLKNKKWRVEVERRYNTEDGVRKPDIIASKEGKCLVLDAQVVSEQSDLNMANDSKVTKYRNNRSLISEIGESHQTTVNNISVLGITLNMRGVWSQASVNHLINAQVITRADIKIISSRVIVGGLAAFNQFNRTTTIATRRGNGGGSR

SEQ ID NO: 33040 - protein, 1028 aa, Androctonus mauritanicus
MAGHIKTCCKGRGKEQDNVDGEFSCEDCGRKFSTKSGKTQHLRAAHPLTYNNQLPDPLEWRRKWTIDEIEKLAVEYVKTEGRSKQDKIRKLSCLFPTRTHESIRNIMKSDKFKSFLRDARSESNIPQEESCETKNLVSEEGPEGDVRGRKPSLESSQAQDKDSIRRVLEELSSSDEENELVNHLNDFIKRVLTGQQADFDKEMSSLLRNAFPRIKSQAYTKRFNLPCRNKRERKIKEYKDLQECWKRDSNRVAEHVLDGCQLDASFPNREVIFEFYSNLFRKSDLDLSKLSFTKKSDSDINYGPFSAAEIYKTIKGLRMKVAPGPDGVTTEVLRKMPVEFFVRLFNLWYLLGRTPKCLKKCRSILIPKGPTVSPDINKWRPLTIGSLLLRVYCKLWANRLKPDLNKRQRAFQKCEGVMENLIILNSIFQSSRVHHKDLCMVFIDIAKAFDTVHHDIIWLTLQRFGIKDCFQEVLKDLYADVSTQFKARDGKTKLIHMQAGVKQGCPLSPIIFNMVLDGLLDVLNREDGFNLLGNRINALAFADDLVLIGYNLESLKRLLKQAEDFLTQTGFKINAIKCKGVYIRPVNKGKTRKVINQPLLINNEKIPMLSPTDFISYLGCNFSHTGKVQIHLDTIKLWCNQIAMARLKVEQKVELLRKNLLPRITYLCLVSNSVTKGFLVKCDRIIKRTLKGFLHLPPGVHDGWWFLPIRRGGLGILNILWSTVKRKLCLFSRMTALEDDVIKSCLQSSWWQSKLKTWRKWVQYYGDLEVPEIKKFFDAKILELETRLSKSDQGFGLSQILENSNSCQWLWGRSTVIKGNKFIKAFKTLSNNLPTRVNINRGKRVAQNMCRLCGESAEVQPHILQSCPKLADCITKRHNKVAALLTGFITDTDGWTVEKEKLRKDSTGVRWKPDLVVFNTRKRLGYIIDVQIPYETTKTNLNYCFDAKARKYECLVELCKTDFDLDEVIPMGFIVGARGGWCAKQNEFCKKFNITYKRKAYLCEMAMMGSINIWETFCSNLRLREARF

SEQ ID NO: 33041 - protein, 966 aa, Triatoma infestans
MEELRVMASREAEVLRQGERNVNQLLLPLFPGRTLESIKGVRRRNDYKALVEDALRDLRLRPAPSDSSSEDSGDEVALPPPPRRSSYSGRVSQRPSDPSHSPVVADFVRDLLWQTVVPGEGFRAEQLRSLASRALDGCDVSEGLVDWLRCCFPDSGVEQSLPRGRVKQGRRRTRASKRKKRRIAYARTQNQWNHNRARAAREVLDGNPKRIAHSLDQLENYWAPLMEAPSGVDYDRCPQMRVNSPICEDVLLGPISTHDVSTWRVSVRSAAGPDNISARQWNAVPPELQALFFNTVLVLGRLPRLLSASRTVFIPKSDLPSSPGGYRPISIVSVVVRHLHRILAARLSNLNLFDTRQRAFISADGVAENLVILDTLLSSAMSPLRQVHLVSLDIMKAFDSLDHGAIEGILEKRGFPRSFIDYVMSCYQVATTTCFVGGRPGKVVNLGRGVRQGDPLSPMIFNLAMDEVLSAIPEEVGFSLEGERVSCLGFADDLVVVASSRVGMRLALERIEAAAAGLGLHFNPGKCHALSFIPDGHNKKMKVVTDPQFSIGGSFITQSTAVSQWRYLGVEFAPKGAKTLELDVSSALENVSQQRLELLRTFFIPRFVHGLVLGNITDGRLLQLDRQIRRHVRGWLRLPKDVALGFFHAPVKDGGLGIPSLRTMIPELTLKRLQKLSSSSYPVARAAWRSRRVQRKVSWATRTLQRLGIPVDGPRPNRKDYWARRLHDSVDGFELRECSHSGSSTRWVAAGAHGIPGRDFVQHVHVRINSLPCRVRTSRGSRRAAQSVRCRAGCPEDETAAHVVQRCFRTHGGRVLRHNAVCNTLASALRGCGWQGEQEPRLQTAVGLRKPDIIAHGRAGALVLDTQIVGGTRPLDLAHKSKIKYYADNPDLSRAVAARVGSLPQEVAFSSATISWRGVWSRRSYADLISFGIPPGILNGVVTRVLQGSHTNWTRFNQMTMVRRAS

SEQ ID NO: 33042 - protein, 1014 aa, Triatoma infestans
MLILAKREAENIIEGVRFMNQALLPLFSNRTLESVKGVRRRADYRAMVDDALRALRSRPSSSLATSPDGAESDSDQSSVSIGSAGMSARPVSPIPASSSEGESELHNAVRSLLWETVAPGEGFNAEQLRCSAAKALDGRDVSDELVSWLRLCFPGAALAQPSGRGTTGGRRGRRPRCKKGKRILRRKAYARTQTLWKRNRSRAAHEVLDGGPRRGAHDLEEIEGFWAPLLQTPMGIEESHPLRKVGPPIAVGDLLGPISTDEVHAHRISVRSAAGPDNISVRAWNAFPPEIHALLYNTILVQGKLPEALRVSRTVFIPKSDLPGSPGGYRPISVVSVVVRHLHKILAARLSALRLFDERQRAFVSADGVAENLVVLDSLLATARSSLREVHLVSLDIMKAFDSLDHGAIERILRARGFPESFIGYILSGYTHASTRFEVKGRSSKDVILRRGVRQGDPLSPLIFNLAMDEILSSIPEEVGFLLEGERVSCLGFADDLVVVASSRLGMSLALSKIEEAASGLGLFLNPNKCHALSCVPDGHGKKYKIVAEPQFRLGGKPLGQSSAVSEWRYLGVDFDPRGAKTIEVDVSAALENLSRAPLKPQQRLVILRTFFIPRFVHGLVLGNVTSGRLLQLDRQVRRYVRTWLRLPKDVALGYFHALPKDGGLGIPSFRTLIPELTIRRIGKMESSEYPPARAAWRTRRVQRKLGWAKGALERFGIPADGPRANRKGYWSSLLHASVDGFELRESSRSQSSTRWITNGSAGVPGRDYVQHIHVHSNCLPTRIRTSRGTRRELMPVHCRAGCAEEETAAHVIQRCFRTHGGRILRHNAVCNMLAASLRSKGWQVEQEPSVQTSVGLRKPDIIAKGRDGALVLDTQVVSGARSLDLLHEIKRKYYADNSSLVEAIATRLGLSTRLVQFTSATISWRGVWSPRSHAELISFGIPPHSKRDSDACAAGLSHELDEVQSDDVDCGTAEGIWCEVRWTSALMVRATTYLELSWGPQLRSKTKEDSPGI

SEQ ID NO: 33043 - protein, 1014 aa, Triatoma infestans
MLILAKREAENIIEGVRFMNQALLPLFSNRSLESVKGVRRRADYRAMVDDALRALRSRPSSSLATSPDGAESDSDQSSVSIGSAGMSARPVSPIPASNSEGESELHNAVRSLLWETVAPGEGFNAEQLRCSAAKALDGRDVSDELVSWLRLCFPGAALAQPSGRGTTGGRRARRPRCKKGKRILRRKAYARTQTLWKRNRSRAAHEVLDGGPRRGAHDLEEIEGFWAPLLQTPMGIEESHPLRKVGPPIAVGDLLGPISTDEVHAHRISVRSAAGPDNISVRAWNAFPPEIHALLYNTILVQGKLPEALRVSRTVFIPKSDLPGSPGGYRPISVVSVVVRHLHKILAARLSALRLFDERQRAFVSADGVAENLVVLDSLLATARSSLREVHLVSLDIMKAFDSLDHGAIERILRARGFPESFIGYILSGYTHASTRFEVGGRSSKDVILRRGVRQGDPLSPLIFNLAMDEILSSIPEEVGFLLEGERVSCLGFADDLVVVASSKLGMSLALSKIEEAASSLGLFLNPNKCHALSCVPDGHGKKYKIVAEPQFQLGGKPLGQSSAVSEWRYLGVDFDPRGAKTIEVDVSAALENLSRAPLKPQQRLVILRTFFIPRFVHGLVLGNVTSGRLLQLDRQVRRYVRTWLRLPKDVALGYFHALPKDGGLGIPSFRTLIPELTIRRIGKMESSEYPPARAAWRTRRVQRKLGWAKGALERFGIPADGPRANRKGYWSSLLHASVDGFELRESSRSQSSTRWITNGSAGVPGRDYVQHIQVHSNCLPTRIRTSRGTRRELMPVHCRAGCAEEETAAHVIQRCFRTHGGRILRHNAVCNMLAASLRSKGWQVEQEPSVQTSVGLRKPDIIAKGRDGALVLDTQVVSGARSLDLLHEIKRKYYADNSSLVEAIATRLGLSTRLVQFTSATISWRGVWSPRSHAELISFGIPPHSKRDSDACAAGLSHELDEVQSDDVDCGTAEGIWCEVRWTSALMVRATTYLELSWGPQLRSNTKEDSPGI

SEQ ID NO: 33044 - protein, 987 aa, Triatoma infestans
MLILAKREAENIIEGVRFMNQALLPLFSNRTLESVKGVRRRADYRAMVDDALRALRSRPSSSLATSPDGAESDSDQSSVSIGSAGMSARPVSPIPASSSEGESELHNAVRSLLWETVAPGEGFNAEQLRCSAAKALDGRDVSDELVSWLRLCFPGAALAQPSGRGTTGGRRGRRPRCKKRKRILRRKAYARTQTLWKRNRSRAAHEVLDGGPRRGAHDLEEIEGFWAPLLQTPMGIEESHPLRKVGPPIAVGDLLGPISTDEVHAHRISVRSAAGPDNISVRAWNAFPPGIHALLYNTILVQGKLPEALRVSRTVFIPKSDLPGSPGGYRPISVVSVVVRHLHKILAARLSALRLFDERQRAFVSADGVAENLVVLDSLLATARSSLREVHLVSLDIMKAFDSLDHGAIECILRARGFPESFIGYILSGYTHASTRFEVKGRSSKDVILRRGVRQGDPLSPLIFNLAMDEILSSIPEEVGFLLEGERVSCLGFADDLVVVASTRLGMGLALSKIEEAASGLGLFLNPNKCHALSCVPDGHGKKYKIVAEPQFRLGGKPLGQSSAVSEWRYLGVDFDPRGAKTIEVDVSAALENLSRAPLKPQQRLVILRTFFIPRFVHGLVLGNVTSGGLLQLDRQVRRYVRTWLRLPKDVALGYFHALPKDGGLGIPSFRTLIPELTIRRIGKMESSEYPPARAAWRTRRVQRKLGWAKGALERFGIPADGPRANRKGYWSSLLHASVDGFELRESSRSQSSTRWITNGSAGVPGRDYVQHIHVHSNCLPTRIRTSRGTRRELTPVHCRAGCAEEETAAHVIQRCFRTHGGRILRHNAVCNMLAASLRSKGWQVEQEPSVQTSVGLRKPDIIAKGRDGALVLDTQVVSGARSLDLLHEIKRKYYADNSSLVEAIATRLGLSTRLVQFTSATISWRGVWSPRSHAELISFGIPPGTLSGIVTRVLQGSHTNWTRFNQMTSTAGRRRASGVRSGGHQL

SEQ ID NO: 33045 - protein, 898 aa, Triatoma infestans
MLILAKREAENIIEGVRFMNQALLPLFSNRSLESVKGVRRRADYRAMVDDALRALRSRPSSSLATSPDGAESDSDQSSVSIGSAGMSARPVSPIPASSSEGESELHNAVRSLLWETVAPGEGFNAEQLRCSAAKALDGRDVSDELVSWLRLCFPGAALAQPSGRGTTGGRRGRRPRCKKRKRILRRKAYARTQTLWKRNRSRAAHEVLDGGPRRGAHDLEEIEGFWAPLLQTPMGIEESHPLRKVGPPIAVGDLLGPISTDEVHAHRISVRSAAGPDNISVRAWNAFPPEIHALLYNTILVQGKLPEALRVSRTVFIPKSDLPGSPGGYRPISVVSVVVRHLHKILAARLSALRLFDERQRAFVSADGVAENLVVLDSLLATARSSLREVHLVSLDIMKAFDSLDHGAIERILRARGFPESFIGYILSGYTHASTRFEVKGRSSKDVILRRGVRQGDPLSPLIFNLAMDEILSSIPEEVGFLLEGERVSCLGFADDLVVVASSRLGMSLALSKIEEAASGLGLFLNPNKCHALSCVPDGHGKKYKIVAEPQFQLGGKPLGQSSAVSEWRYLGVDFDPRGAKTIEVDVSAALENLSRAPLKPQQRLVILRTFFIPRFVHGLVLGNVTSGRLLQLDRQVRRYVRTWLRLPKDVALGYFHALPKDGGLGIPSFRTLIPELTIRRIGKMESSEYPPARAAWRTRRVQRKLGWAKGALERFGIPADGPRANRKGYWSSLLHASVDGFELRESSRSQSSTRWITNGSAGVPGRDYVQHIHVHSNCLPTRIRTSRGTRRELMPVHCSAEEETAAHVIQRCFRTHGGRILRHNAVCNMLAASLRSKGWQVEQEPSVQTSVGLRKPRLLQKAGMARWCCTPRLSAVLGPWTCYMKLKGNITLTTRAW

SEQ ID NO: 33046 - protein, 898 aa, Triatoma infestans
MLILAKREAENIIEGVRFMNQALLPLFSNRSLESVKGVRRRADYRAMVDDALRALRSRPSSSLATSPDGAESDSDQSSVSIGSAGMSARPVSPIPASNSEGESELHNAVRSLLWETVAPGEGFNAEQLRCSAAKALDGRDVSDELVSWLRLCFPGAALAQPSGRGTTGGRRGRRPRCKKGKRILRRKAYARTQTLWKRNRSRAAHEVLDGGPRRGAHDLEEIEGFWAPLLQTPMGIEESHPLRKVGPPIAVGDLLGPISTDEVHAHRISVRSAAGPDNISVRAWNAFPPEIHALLYNTILVQGKLPEALRVSRTVFIPKSDLPGSPGGYRPISVVSVVVRHLHKILAARLSALRLFDERQRAFVSADGVAENLVVLDSLLATARSSLREVHLVSLDIMKAFDSLDHGAIERILRARGFPESFIGYILSGYTHASTRFEVKGRSSKDVILRRGVRQGDPLSPLIFNLAMDEILSSIPEEVGFLLEGERVSCLGFADDLVVVASSKLGMSLALSKIEEAASGLGLFLNPNKCHALSCVPDGHGKKYKIVAEPQFQLGGKPLGQSSAVSEWRYLGVDFDPRGAKTIEVDVSAALENLSRAPLKPQQRLVILRTFFIPRFVHGLVLGNVTSGGLLQLDRQVRRYVRTWLRLPKDVALGYFHALPKDGGLGIPSFRTLIPELTIRRIGKMESSEYPPARAAWRTRRVQRKLGWAKGALERFGIPADGPRANRKGYWSSLLHASVDGFELRESSRSQSSTRWITNGSAGVPGRDYVQHIHVHSNCLPTRIRTSRGTRRELMPVHCSAEEETAAHVIQRCFRTHGGRILRHNAVCNMLAASLRSKGWQVEQEPSVQTSVGLRKPRLLQKAGMARWCCTPRLSAVLGPWTCYMKLKGNITLTTRAW

SEQ ID NO: 33047 - protein, 987 aa, Triatoma infestans
MLILAKREAENIIEGVRFMNQALLPLFSNRSLESVKGVRRRADYRAMVDDALRALRSRPSSSLATSPDGAESDSDQSSVSIGSAGMSARPVSPIPASNSEGESELHNAVRSLLWETVAPGEGFNAEQLRCSAAKALDGRDVSDELVSWLRLCFPGAALAQPSGRGTTGGRRARRPRCKKGKRILRRKAYARTQTLWKRNRSRAAHEVLDGGPRRGAHDLEEIEGFWAPLLQTPMGIEESHPLRKVGPPIAVGDLLGPISTDEVHAHRISVRSAAGPDNISVRAWNAFPPEIHALLYNTILVQGKLPEALRVSRTVFIPKSDLPGSPGGYRPISVVSVVVRHLHKILAARLSALRLFDERQRAFVSADGVAENLVVLDSLLATARSSLREVHLVSLDIMKAFDSLDHGAIERILRARGFPESFIGYILSGYTHASTRFEVGGRSSKDVILRRGVRQGDPLSPLIFNLAMDEILSSIPEEVGFLLEGERVSCLGFADDLVVVASSRLGMSLALSKIEEAASGLGLFLNPNKCHALSCVPDGHGKKYKIVAEPQFQLGGKPLGQSSAVSEWRYLGVDFDPRGAKTIEVDVSAALENLSRAPLKPQQRLVILRTFFIPRFVHGLVLGNVTSGRLLQLDRQVRRYVRTWLRLPKDVALGYFHALPKDGGLGIPSFRTLIPELTIRRIGKMESSEYPPARAAWRTRRVQRKLGWAKGALERFGIPADGPRANRKGYWSSLLHASVDGFELRESSRSQSSTRWITNGSAGVPGRDYVQHIQVHSNCLPTRIRTSRGTRRELMPVHCRAGCAEEETAAHVIQRCFRTHGGRILRHNAVCNMLAASLRSKGWQVEQEPSVQTSVGLRKPDIIAKGRDGALVLDTQVVSGARSLDLLHEIKRKYYADNSSLVEAIATRLGLSTRLVQFTSATISWRGVWSPRSHAELISFGIPPGTLSGIVTRVLQGSHTNWTRFNQMTSTAGRRRASGVRSGGHQL

SEQ ID NO: 33048 - protein, 987 aa, Triatoma infestans
MLILAKREAENIIEGVRFMNQALLPLFGNRSLESVKGVRRRADYRAMVDDALRALRSRPSSSLATSPDGAESDSDQSSVSIGSAGMSARPVSPIPASSSEGESELHNAVRSLLWETVAPGEGFNAEQLRCSAAKALDGRDVSDELVSWLRLCFPGAALAQPSGRGTTGGRRGRRPRCKKGKRILRRKAYARTQTLWKRNRSRAAHEVLDGGPRRGAHDLEEIEGFWAPLLQTPMGIEESHPLRKVGPPIAVGDLLGPISTDEVHAHRISVRSAAGPDNISVRAWNAFPPEIHALLYNTILVQGKLPEALRVSRTVFIPKSDLPGSPGGYRPISVVSVVVRHLHKILAARLSALRLFDERQRAFVSADGVAENLVVLDSLLATARSSLREVHLVSLDIMKAFDSLDHGAIERILRARGFPESFIGYILSGYTHASTRFEVKGRSSKDVILRRGVRQGDPLSPLIFNLAMDEILSSIPEEVGFLLEGERVSCLGFADDLVVVASSRLGMSLALSKIEEAASGLGLFLNPNKCHALSCVPDGHGKKYKIVAEPQFQLGGKPLGQSSAVSEWRYLGVDFDPRGAKTIEVDVSAALENLSRAPLKPQQRLVILRTFFIPRFVHGLVLGNVTSGGLLQLDRQVRRYVRTWLRLPKDVALGYFHALPKDGGLGIPSFRTLIPELTIRRIGKMESSEYPPARAAWRTRRVQRKLGWAKGALERFGIPAVGPRANRKGYWSSLLHASVDGFELRESSRSQSSTRWITNGSAGVPGRDYVQHIHVHSNCLPTRIRTSRGTRRELMPVHCRAGCAEEETAAHVIQRCFRTHGGRILRHNAVCNMLAASLRSKGWQVEQEPSVQTSVGLRKPDIIAKGRDGALVLDTQVVSGARSLDLLHEIKRKYYADNSSLVEAIATRLGLSTRLVQFTSATISWRGVWSPRSHAELISFGIPPGTLSGIVTRVLQGSHTNWTRFNQMTSTAGRRRASGVRSGGHQL

SEQ ID NO: 33049 - protein, 972 aa, Triatoma infestans
MEELRVMASREAEVLRQGERNVNQLLLPLFPGRTLESIKGVRRRADYKALVEDALRDLRLRPAPSDSSSEDSGDEVALPPPPRRSSYSGGVSQRPSDPSHSPVVADFVRDLLWQTVVPGEGFRAEQLRSLASRALDGCDVSEGLVDWLRCCFPDSGVEQSLPRGRVKQGRRRTRASKRKKRRIAYARTQNQWNHNRARAAREVLDGNPKRIAHSLDQLENYWAPLMEAPSGVDYDRCPQMRVNSPICEDVLLGPISTHDVSTWRVSVRSAAGPDNISARQWNAVPPELQALFFNTVLVLGRLPRLLSASRTVFIPKSDLPSSPGGYRPISIVSVVVRHLHRILAARLSNLNLFDTRQRAFISADGVAENLVILDTLLSSAMSPLRQVHLVSLDIMKAFDSLDHGAIEGILEKRGFPRSFIDYVMSCYQVATTTFFVGGRPGKVVNLGRGVRQGDPLSPMIFNLAMDEVLSAIPEEVGFSLEGERVSCLGFADDLVVVASSRVGMRLALERIEAAAAGLGLHFNPGKCHALSFIPDGHNKKMKVVTDPQFSIGGSFITQSTAVSQWRYLGVEFAPKGAKTLELDVSSALENVSKAPLKPQQRLELLRTFFIPRFVHGLVLGNITDGRLLQLDRQIRRHVRGWLRLPKDVALGFFHAPVKDGGLGIPSLRTMIPELTLKRLQKLSSSSYPVARAAWRSRRVQRKVSWATRTLQRLGIPVDGPRPNRKDYWARRLHDSVDGFELRECSHSSSSTRWVAAGAHGIPGRDFVQHVHVRINSLPCRVRTSRGSRRAAQSVRCRAGCPEDETAAHVVQRCFRTHGGRVLRHNAVCNTLASALRGCGWQVEQEPRLQTAVGLRKPDIIAHGRAGALVLDTQIVGGTRPLDLAHKSKIKYYADNPDLSRAVAARVGSLPQEVAFSSATISWRGVWSRRSYADLISFGIPPGILNGVVTRVLQGSHTNWTRFNQMTMVRRAS

SEQ ID NO: 33050 - protein, 987 aa, Triatoma infestans
MLILAKREAENIIEGVRFMNQALLPLFSNRSLESVKGVRRRADYRAMVDDALRALRSRPSSSLATSPDGAESDSDQSSVSIGSAGMSARPVSPIPVSSSEGESELHNAVRSLLWETVAPGEGFNAEQLRCSAAKALDGRDVSDELVSWLRLCFPGAALAQPSGRGTTGGRRARRPRCKKGKRILRRKAYARTQTLWKRNRSRAAHEVLDGGPRRGAHDLEEIEGFWAPLLQTPMGIEESHPLRKVGPSIAVGDLLGPISTDEVHAHRISVRSAAGPDNISVRAWNAFPPEIHALLYNTILVQGKLPEALRVSRTVFIPKSDLPGSPGGYRPISVVSVVVRHLHKILAARLSALRLFDERQRAFVSADGVAENLVVLDSLLATARSSLREVHLVSLDIMKAFDSLDHGAIERILRARGFPESFIGYILSGYTHASTRFEVKGRSSKDVILRRGVRQGDPLSPLIFNLAMDEILSSIPEEVGFLLEGERVSCLGFADDLVVVASSRLGMSLALSKIEEAASGLGLFLNPNKCHALSCVPDGHGKKYKIVAEPQFQLGGKPLGQSSAVSEWRYLGVDFDPRGAKTIEVDVSAALENLSRAPLKPQQRLVILRTFFIPRFVHGLVLGNVTSGRLLQLDRQVRRYVRTWLRLPKDVALGYFHALPKDGGLGIPSFRTLIPELTIRRIGKMESSEYPPARAAWRTRRVQRKLGWAKGALERFGIPADGPRANRKGYWSSLLHASVDGFELRESSRSQSSTRWITNGSAGVPGRDYVQHIQVHSNCLPTRIRTSRGTRRELMPVHCRAGCAEEETAAHVIQRCFRTHGGRILRHNAVCNMLAASLRSKGWQVEQEPSVQTSVGLRKPDIIAKGRDGALVLDTQVVSGARSLDLLHEIKRKYYADNSSLVEAIATRLGLSTRLVQFTSATISWRGVWSPRSHAELISFGIPPGTLSGIVTRVLQGSHTNWTRFNQMTSTAGRRRASGVRSGGHQL

SEQ ID NO: 33051 - protein, 987 aa, Triatoma infestans
MAKREAECTMAGTRFLNQALLPLFSNRSLESVKGVRRRADYRAMVEDALRALRSRPSTPPSATSSDGVESDSDHSSVSIGSAGMGAGFVPLSPASDFIEGESELRNAVRSLLWETVVPGEGFNAEQLRCSAAKALDGHDVSNELVSWLRLCFPDAALAQPSGRGTFGGRRGRRPKRTSKRLKRRKAYARTQTLWKRNRSRAAHEVLDGGPRRGAHGLEEIERFWAPLLQTPMGIEESHPLRKVGPPIAVGDLLGPISMDEVHAHRFAVRSAAGPDNISVRSWNAVPPSIKALLYNTILVQGKLPEALRVSRTVFIPKSDLPGSPGGYRPISVVSVVVRHLHKILAARLSALRLFDVRQRAFVSADGVAENLVILDSLLATARSSMREVHLVSLDIMKAFDSLDHGAIERILRARGFPESFIGYVLSGYNNARTRFEVKGRSSKDVILRRGVRQGDPLSPLIFNLAVDEILSSIPEEVGFLLEGERVSCLGFADDLVVVASSRLGMSLALSKIEEAASGMGLFLNPNKCHALSCIPDGHGKKYKIVAEPQFRLGGKPLGQSSAVSEWRYLGVDFDPRGAKTIEVDVSAALENLSRAPLKPQQRLVILRTFFIPRFVHVLVLGNVTSGRLLQLDRQVRRYVRTWLRLPKDVALGYFHALPKDGGLGIPSFRTLIPELTVRRIGKLESSEYPPARAAWRSRRVQRKLGWAKGALERFGIPADGPRANRKGYWSSLLHASVDGFELRESSRTQSSTRWIVNGSAGVPGRDYVQHVHVHINCLPTRIRTSRGIRRGSMPVHCRAGCAEEETAAHVIQRCFRTHGGRILRHNAVCNMLAASLRSKGWQVEQEPSVQTSVGLRKPDIIAKGRDGALVLDTQVVSGARSLDLAHQSKKKYYADNSDLVEAVATRFGLSTRKVEFTSATLSWRGVWSPRSHAELISFGIPPGTLSGVVTRVLQGPHTNWTRFNQMTSTAGRRGTSGVGPGGISASG

SEQ ID NO: 33052 - protein, 972 aa, Triatoma infestans
MEELRVMASREAEVLRQGERNVNQLLLPLFPGRTLESIKGVRRRADYKALVEDALRDLRLRPAPSDSSSEDSGDEVALPPPPRRSSYSGGVSQRPSDPSHSPVVADFVRDLLWQTVVPGEGFRAEQLRSLASRALDGCDVSEGLVDWLRCCFPDSGVEQSLPRGRVKQGRRRTRASKRKKRRIAYARTQNQWNHNRARAAREVLDGNPKRIAHSLDQLENYWAPLMEAPSGVDYDRCPQMRVNSPISEDVLLGPISTHDVSTWRVSVRSAAGPDNISARQWNAVPPELQALFFNTVLVLGRLPRLLSASRTVFIPKSDLPSSPGGYRPISIVSVVVRHLHRILAARLSNLNLFDTRQRAFISADGVAENLVILDTLLSSAMSPLRQVHLVSLDIMKAFDSLDHGAIEGILEKRGFPRSFIDYVMSCYQVATTTFFVGGRPGKVVNLGRGVRQGDPLSPMIFNLAMDEVLSAIPEEVGFSLEGERVSCLGFADDLVVVASSRVGMRLALERIEAAAAGLGLHFNPGKCHALSFIPDGHNKKMKVVTDPQFSIGGSFITQSTAVSQWRYLGVEFAPKGAKTLELDVSSALENVSKAPLKPQQRLELLRTFFIPRFVHGLVLGNITDGRLLQLDRQIRRHVRGWLRLPKDVALGFFHAPVKDGGLGIPSLRTMIPELTLKRLQKLSSSSYPVARAAWRSRRVQRKVSWATRTLQRLGIPVDGPRPNRKDYWARRLHDSVDGFELRECSHSSSSTRWVAAGAHGIPGRDFVQHVHVRINSLPCRVRTSRGSRRAAQSVRCRAGCPEDETAAHVVQRCFRTHGGRVLRHNAVCNTLASALRGCGWQVEQEPRLQTAVGLRKPDIIAHGRAGALVLDTQIVGGTRPLDLAHKSKIKYYADNPDLSRAVAARVGSLPQEVAFSSATISWRGVWSRRSYADLISFGIPPGILNGVVTRVLQGSHTNWTRFNQMTMVRRAS

SEQ ID NO: 33053 - protein, 972 aa, Triatoma infestans
MEELRVMASREAEVLRQGERNVNQLLLPLFPGRTLESIKGVRRRADYKALVEDALRDLRLRPAPSDSSSEDSGDEVALPPPPRRSSYSGGVSQRPSDPSHSPVVADFVRDLLWQTVVPGEGFRAEQLRSLASRALDGCDVSEGLVDWLRCCFPDSGVEQSLPRGRVKQGRRRTRASKRKKRRIAYARTQNQWNHNRARAAREVLDGNPKRIAHSLDQLENYWAPLMEAPSGVDYDRCPQMRVNSPISEDVLLGPISTHDVSTWRVSVRSAAGPDNISARQWNAVPPELQALFFNTVLVLGRLPRLLSASRTVFIPKSDLPSSPGGYRPISIVSVVVRHLHRILAARLSNLNLFDARQRAFISADGVAENLVILDTLLSSAMSPLRQVHLVSLDIMKAFDSLDHGAIEGILEKRGFPRSFIDYVMSCYQVATTTFFVGGRPGKVVNLGRGVRQGDPLSPMIFNLAMDEVLSAIPEEVGFSLEGERVSCLGFADDLVVVASSRVGMRLALERIEAAAAGLGLHFNPGKCHALSFIPDGHNKKMKVVTDPQFSIGGSFITQSTAVSQWRYLGVEFAPKGAKTLELDVSSALENVSKAPLKPQQRLELLRTFFIPRFVHGLVLGNITDGRLLQLDRQIRRHVRGWLRLPKDVALGFFHAPVKDGGLGIPSLRTMIPELTLKRLQKLSSSSYPVARAAWRSRRVQRKVSWATRTLQRLGIPVDGPRPNRKDYWARRLHDSVDGFELRECSHSSSSTRWVAAGAHGIPGRDFVQHVHVRINSLPCRVRTSRGSRRAAQSVRCRAGCPEDETAAHVVQRCFRTHGGRVLRHNAVCNTLASALRGCGWQVEQEPRLQTAVGLRKPDIIAHGRAGALVLDTQIVGGTRPLDLAHKSKIKYYADNPDLSRAVAARVGSLPQEVAFSSATISWRGVWSRRSYADLISFGIPPGILNGVVTRVLQGSHTNWTRFNQMTMVRRAS

SEQ ID NO: 33054 - protein, 972 aa, Triatoma infestans
MEELRVMASREAEVLRQGERNVNQLLLPLFPGRTLESIKGVRRRNDYKALVEDALRDLRLRPAPSDSSSEDSGDEVALPPPPRRSSYSGRVSQRPSDPSHSPVVADFVRDLLWQTVVPGEGFRAEQLRSLASRALDGCDVSEGLVDWLRCCFPDSGVEQPLPRGRVKQGRRRTRASKRKKRRIAYARTQNQWNHNRARAAREVLDGNPKRIAHSLDQLENYWAPLMEAPSGVDYDRCPQMRVNSPISEDVLLGPISTHDVSTWRVSVRSAAGPDNISARQWNAVPPELQALFFNTVLVLGRLPRLLSASRTVFIPKSDLPSSPGGYRPISIVSVVVRHLHGILAARLSNLNLFDTRQRAFISADGVAENLVILDTLLSSAMSPLRQVHLVSLDIMKAFDSLDHGAIEGILEKRGFPRSFIDYVMSCYQVATTTFFVGGRPGKVVNLGRGVRQGDPLSPMIFNLAMDEVLSAIPEEVGFSLEGERVSCLGFADDLVVVASSRVGMRLALERIEAAAAGLGLHFNPGKCHALSFIPDGHNKKMKVVTDPQFSIGGSFITQSTAVSQWRYLGVEFAPKGAKTLELDVSSALENVSKAPLKPQQRIELLRTFFIPRFVHGLVLGNITDGRLLQLDRQIRRHVRGWLRLPKDVALGFFHAPVKDGGLGIPSLRTMIPELTLKRLQKLSSSSYPVARAAWRSRRVQRKVSWATRTLQRLGIPVDGPRPNRKDYWARRLHDSVDGFELRECSHSSSSTRWVAAGAHGIPGRDFVQHVHVRINSLPCRVRTSRGSRRAAQSVRCRAGCPEDETAAHVVQRCFRTHGGRVLRHNAVCNTLASALRGCGWQVEQEPRLQTAVGLRKPDIIAHGRAGALVLDTQIVGGTRPLDLAHKSKIKYYADNPDLSRAVAARVGSLPQEVAFSSATISWRGVWSRRSYADLISFGIPPGILNGVVTRVLQGSHTNWTRFNQMTMVRRAS

SEQ ID NO: 33055 - protein, 972 aa, Triatoma infestans
MEELRVMASREAEVLRQGERNVNQLLLPLFPGRTLESIKGVRRRNDYKALVEDALRDLRLRPAPSDSSSEDSGDEVALPPPPRRSSYSGGVSQRPSDPSPSPVVADFVRDLLWQTVVPGEGFRAEQLRSLASRALDGCDVSEGLVDWLRCCFPDSGVEQSLPRGRVKQGRRRTRASKRKKRRIAYARTQNQWNHNRARAAREVLDGNPKRIAHSLDQLENYWAPLMEAPSGVDYDRCPQMRVNSPISEDVLLGPISTHDVSTWRVSVRSAAGPDNISARQWNAVPPELQALFFNTVLVLGRLPRLLSASRTVFIPKSDLPSSPGGYRPISIVSVVVRHLHGILAARLSNLNLFDARQRAFISADGVAENLVILDTLLSSAMSPLRQVHLVSLDIMKAFDSLDHGAIGGILEKRGFPRSFIDYVMSCYQVATTTFFVGGRPGKVVNLGRGVRQGDPLSPMIFNLAMDEVLSAIPEEVGFSLEGERVSCLGFADDLVVVASSRVGMRLALERIEAAAAGLGLHFNPGKCHALSFIPDGHNKKMKVVTDPQFSIGGSFITQSTAVSQWRYLGVEVAPKGAKTLELDVSSALENVSKAPLKPQQRLELLRTFFIPRFVHGLVLGNITDGRLLQLDRQIRRHVRGWLRLPKDVALGFFHAPVKDGGLGIPSLRTMIPELTLKRLQKLSSSSYPVARAAWRSRRVQRKVSWAPRTLQRLGIPVDGPRPNRKDYWARRLHDSVDGFELRECSHSSSSTRWVAAGAHGIPGRDFVQHVHVRINSLPCRVRTSRGSRRAAQSVRCRAGCPEDETAAHVVQRCFRTHGGRVLRHNAVCNTLASALRGCGWQVEQEPRLQTAVGLRKPDIIAHGRAGALVLDTQIVGGTRPLDLAHKSKIKYYADNPDLSRAVAARVGSLPQEVAFSSATISWRGVWSRRSYADLISFGIPPGILNGVVTRVLQGSHTNWTRFNQMTMVRRAS

SEQ ID NO: 33056 - protein, 944 aa, Triatoma infestans
MAKREAECTMAGTRFLNQALLPLFSNRSLESVKGVRRRADYRAMVEDALRALRSRPSTPPSATSSDGVESDSDHSSVSIGSAGMGAGFVPLSPASDFIEGESELRNAVRSLLWETVVPGEGFNAEQLRCSAAKALDGHDVSNELVSWLRLCFPDAALAQPSGRGTFGGRRGRRPKRTSKRLKRRKAYARTQTLWKRNRSRAAHEVLDGGPRRGAHGLEEIERFWAPLLQTPMGIEESHPLRKVGPPIAVGDLLGPISMDEVHAHRIAVRSAAGPDNISVRSWNAVPPSIKALLYNTILVQGKLPEALRVSRTVFIPKSDLPGSPGGYRPISVVSVVVRHLHKILAARLSALRLFDVRQRAFVSADGVAENLVILDSLLATARSSMREVHLVSLDIMKAFDSLDHGAIERILRARGFPESFIGYVLSGYNNARTRFEVKGRSSKDVILRRGVRQGDPLSPLIFNLAVDEILSSIPEEVGFLLEGERVSCLGFADDLVVVASSRLGMSLALSKIEEAASGMGLFLNPNKCYALSCIPDGHGKKYKIVAEPQFRLGGKPLGQSSAVSEWRYLGVDFDPRGAKTIEVDVSAALENLSRAPLKPQQRLVILRTFFIPRFVHVLVLGNVTSGRLLQLDRQVRRYVRTWLRLPKDVALGYFHALPKDGGLGIPSFRTLIPELTVRRIGKLESSEYPPARAAWRSRRVQRKLGWAKGALERFGIPADGPRANRKGYWSSLLHASVDGFELRESSRTQSSTRWIVNGSAGVPGRDYVQHVHVHINCLPTRIRTSRGIRRGSMPVHCRAGCAEEETAAHVIQRCFRTHGGRILRHNAVCNMLAASLRSKGWQVEQEPSVQTSVGLRKPDIIAKGRDGALVLDTQVVSGARSLDLAHQSKKKYYADNSDLVEAVATRFGLSTRKVEFTSLRFPGVGFGLRGHTRNLSHLGSPRGL

SEQ ID NO: 33057 - protein, 987 aa, Triatoma infestans
MLILAKREAENIIEGVRFMNQALLPLFSNRSLESVKGVRRRADYRAMVDDALRALRSRPSSSLATSPDGAESDSDQSSVSIGSAGMSARPVSPIPASNSEGESELHNAVRSLLWETVAPGEGFNAEQLRCSAAKALDGRDVSDELVSWLRLCFPGAALAQPSGRGTTGGRRARRPRCKKGKRILRRKAYARTQTLWKRNRSRAAHEVLDGGPRRGAHDLEEIEGFWAPLLQTPMGIEESHPLRKVGPPIAVGDLLGPISTDEVHAHRISVRSAAGPDNISVRAWNAFPPEIHALLYNTILVQGKLPEALRVSRTVFIPKSDLPGSPGGYRPISVVSVVVRHLHKILAARLSALRLFDERQRAFVSADGVAENLVVLDSLLATARSSLREVHLVSLDIMKAFDSLDHGAIERILRARGFPESFIGYILSGYTHASTRFEVGGRSSKDVILRRGVRQGDPLSPLIFNLAMDEILSSIPEEVGFLLEGERVSCLGFADDLVVVASSRLGMSLALSKIEEAASGLGLFLNPNKCHALSCVPDGHGKKYKIVAEPQFQLGGKPLGQSSAVSEWRYLGVDFDPRGAKTIEVDVSAALENLSRAPLKPQQRLVILRTFFIPRFVHGLVLGNVTSGRLLQLDRQVRRYVRTWLRLPKDVALGYFHALPKDGGLGIPSFRTLIPELTIRRIGKMESSEYPPARAAWRTRRVQRKLGWAKGALERFGIPADGPRANRKGYWSSLLHASVDGFELRESSRSQSSTRWITNGSAGVPGRDYVQHIHVHSNCLPTRIRTSRGTRRELMPVHCRAGCAEEETAAHVIQRCFRTHGGRILRHNAVCNMLAASLRSKGWQVEQEPSVQTSVGLRKPDIIAKGRDGALVLDTQVVSGARSLDLLHEIKRKYYADNSSLVEAIATRLGLSTRLVQFTSATISWRGVWSPRSHAELISFGIPPGTLSGIVTRVLQGSHTNWTRFNQMTSTAGRRRASGVRSGGHQL

SEQ ID NO: 33058 - protein, 987 aa, Triatoma infestans
MLILAKREAENIIEGVRFMNQALLPLFSNRSLESVKGVRRRADYRAMVDDALRALRSRPSSSLATSPDGAESDSDQSSVSIGSAGMSARPVSPIPASNSEGESELHNAVRSLLWETVAPGEGFNAEQLRCSAAKALDGRDVSDELVSWLRLCFPGAALAQPSGRGTTGGRRARRPRCKKGKRILRRKAYARTQTLWKRNRSRAAHEVLDGGPRRGAHDLEEIEGFWAPLLQTPMGIEESHPLRKVGPPIAVGDLLGPISTDEVHAHRISVRSAAGPDNISVRAWNAFPPEIHALLYNTILVQGKLPEALRVSRTVFIPKSDLPGSPGGYRPISVVSVVVRHLHKILAARLSALRLFDERQRAFVSADGVAENLVVLDSLLATARSSLREVHLVSLDIMKAFDSLDHGAIERILRARGFPESFIGYILSGYTHASTRFEVKGRSSKDVILRRGVRQGDPLSPLIFNLAMDEILSSIPEEVGFLLEGERVSCLGFADDLVVVASSRLGMSLALSKIEEAASGLGLFLNPNKCHALSCVPDGHGKKYKIVAEPQFQLGGKPLGQSSAVSEWRYLGVDFDPRGAKTIEVDVSAALENLSRAPLKPQQRLVILRTFFIPRFVHGLVLGNVTSGRLLQLDRQVRRYVRTWLRLPKDVALGYFHALPKDGGLGIPSFRTLIPELTIRRIGKMESSEYPPARAAWRTRRVQRKLGWAKGALERFGIPADGPRANRKGYWSSLLHASVDGFELRESSRSQSSTRWITNGSAGVPGRDYVQHIHVHSNCLPTRIRTSRGTRRELMPVHCRAGCAEEETAAHVIQRCFRTHGGRILRHNAVCNMLAASLRSKGWQVEQEPSVQTSVGLRKPDIIAKGRDGALVLDTQVVSGARSLDLLHEIKRKYYADNSSLVEAIATRLGLSTRLVQFTSATISWRGVWSPRSHAELISFGIPPGTLSGIVTRVLQGSHTNWTRFNQMTSTAGRRRASGVRSGGHQL

SEQ ID NO: 33059 - protein, 968 aa, Triatoma infestans
MATSEAEAILNGEKFVNQKLLPLFPQRSLESVKGVRRRADYKALVEDALRELRSHAASSHTFPNDSGEEVCLSPSLTSCSSSEENQGPSNNANPSAVGDIRSYISDNLLPQTVVPGEGFHAEKLRSLAVRALEGFDVSDGLVDWLRSCFPEASMEQFRGKSCKRKHKRTRTSKRKQRRIAYAHTQTLWRRNRARAAREVLDGTPKRVAHDINQIDKYWAPLMQSPSGVDHDGCSLTRVSSPISEQVLCGPIDTHDVSIWRVSVRSAAGPDQLTARKWNAVPPELQALFFNVVLLQGKLPRHLCSSRTIFLPKTDLPQSPGGYRPISVTSVVVRHLHKILAARISSLNPFDSRQRAFISADGVAENLVILDALLSAARYPLRQVHLVSLDIMKAFDSLDHGAIERILRSRGFPEMFIDYVMSGYREATTCFLVRGKPGKVVNLRRGVRQGDPLSPLIFNLAIDEVLAAIPEEVGFSLEGERVSCLGFADDLVVVTSSRVGMSTALKRIEAAAARLGLHLNPDKCHAFSFVPDGHSKKLKVVTDPQFSIGGSVLEQSTSLSQWRYLGIDFDLKGARSLELDVSAALGNLSKAPLKPQQRLEVLRTYFIPRFVHGLVLGNVIDGKLLQLDRQIRKSVRRWLRLPKDVSLGFFHASAKDGGLGIPSLRTMIPELTFKRLNKLQTSDYPAACAAWRSRRVQRKINWASRMLQRLAIPLDGPRPNRKGYWTRRLYDSIDGYELKECSKTKSSTRWIAAGSYGIPGRDYIQHVHVWINSLPGRVRMTRGRRGDAQSVSCRAGCPEDETSAHIIQRCFRTHGGRILRHNAVCNTLASALKAAGWNVEQEPQLKTAEGLRKPDIIAHGRRGTLVLDAQIVGGARPLDVAHKSKIKYYADNPDLATSVATRFGTPPQDVAFSSATISWRGVWSPRSYADLISFGIPPGILNGVVTRVLQGSHTNWTRFNQMTSKRRMV

SEQ ID NO: 33060 - protein, 972 aa, Triatoma infestans
MEELRVMASREAEVLRQGERNVNQLLLPLFPGRTLESIKGVRRRNDYKALVEDALRDLRLRPAPSDSSSEDSGDEVALPPPPRRSSYSGGVSQRPSDPSHSPVVADFVRDLLWQTVVPGEGFRAEQLRSLASRALDGCDVSEGLVDWLRCCFPDSGVEQPLPRGRVKQGRRRTRASKRKKRRIAYARTQNQWNHNRARAAREVLDGNPKRIAHSLDQLENYWAPLMEAPSGVDYDRCPQMRVNSPISEDVLLGPISTHDVSTWRVSVRSAAGPDNISARQWNAVPPELQALFFNTVLVLGRLPRLLSASRTVFIPKSDLPSSPGGYRPISIVSVVVRHLHRILAARLSNLNLFDTRQRAFISADGVAENLVILDTLLSSAMSPLRQVHLVSLDIMKAFDSLDHGAIEGILEKRGFPRSFIDYVMSCYQVATTTFFVGGRPGKVVNLGRGVRQGDPLSPMIFNLAMDEVLSAIPEEVGFSLEGERVSCLGFADDLVVVASSRVGMRLALERIEAAAAGLGLHFNPGKCHALSFIPDGHNKKMKVVTDPQFSIGGSFITQSTAVSQWRYLGVEFAPKGAKTLELDVSSALENVSKAPLKPQQRLELLRTFFIPRFVHGLVLGNITDGRLLQLDRQIRRHVRGWLRLPKDVALGFFHAPVKDGGLGIPSLRTMIPELTLKRLQKLSSSSYPVARAAWRSRRVQRKVSWATRTLQRLGIPVDGPRPNRKDYWARRLHDSVDGFELRECSHSSSSTRWVAAGAHGIPGRDFVQHVHVRINSLPCRVRTSRGSRRAAQSVRCRAGCPEDETAAHVVQRCFRTHGGRVLRHNAVCNTLASALRGCGWQVEQEPRLQTAVGLRKPDIIAHGRAGALVLDTQIVGGTRPLDLAHKSKIKYYADNPDLSRAVAARVGSLPQEVAFSSATISWRGVWSRRSYADLISFGIPPGILNGVVTRVLQGSHTNWTRFNQMTMVRRAS

SEQ ID NO: 33061 - protein, 968 aa, Triatoma infestans
MATSEAEAILNGEKFVNQKLLPLFPQRSLESVKGVRRRADYKALVEDALRELRSHAASSHTFPNDSGEEVCLSPSLTSCSSSEENQGPSNNANPSAVGDIRSYISDNLLPQTVVPGEGFHAEKLRSLAVRALEGFDVSDGLVDWLRSCFPEASMEQFRGKSCKRKHKRTRNSKRKQRRIAYAHTQTLWRRNRARAAREVLDGTPKRVAHDINQIDKYWAPLMQSPSGVDHDGCSLTRVSSPISEQVLCGPIDTHDVSIWRVSVRSAAGPDQLTARKWNAVPPELQALFFNVVLLQGKLPRHLCSSRTIFLPKTDLPQSPGGYRPISVTSVVVRHLHKILAARISSLNPFDSRQRAFISADGVAENLVILDALLSAARYPLRQVHLVSLDIMKAFDSLDHGAIERILRSRGFPEMFIDYVMSGYREATTCFLVRGKPGKVVNLRRGVRQGDPLSPLIFNLAMDEVLAAIPEEVGFSLEGERVSCLGFADDLVVVTSSRVGMSTALKRIEAAAARLGLHLNPDKCHAFSFVPDGHSKKLKVVTDPQFSIGGSVIEQSTSLSQWRYLGIDFDLKGARSLELDVSAALGNLSKAPLKPQQRLEVLRTYFIPRFVHGLVLGNVTDGRLLQLDRQIRKSVRGWLRLPKDVSLGFFHAPAKDGGLGIPSLRTMIPELTFKRLNKLQTSDYPAACAAWRSRRVQRKINWASRMLQRLAIPLDGPRPNRKGYWTRRLYDSIDGYELKECSKTKSSTRWIAAGSYGIPGRDYIQHVHVWINSLPGRVRMTRGRRGDAQSVSCRAGCPEDETSAHIIQRCFRTHGGRILRHNAVCNTLASALKAVGWNVEQEPQLHTAEGLRKPDIIAHGRRGTLVLDAQVVGGARPLDVAHKSKIKYYADNSDLATLVATRFGTPPQDVAFSSATISWRGVWSPRSYADLISFGIPPGILNGVVTRVLQGSHTNWTRFNQMTSKRRMV

SEQ ID NO: 33062 - protein, 1668 aa, Teleogryllus occipitalis
MTRTRNRVYPSPIPALRSISEVAASRPRRSRSLPPSPHSGQRGSPSDYLNLNKPNSPLSTPPGQGVRHSELTSKLDQSLLRAQALISKALSIVPPKSPDADTSSRTSSSSPPSLSSSHSAASFRDASSQTDDGSSVHSSDLPISPISSSSSGGDPPHFSSSSNLSPPAAPPQPILSSTPVRLSSDRPPTPSAPPSQTISSTPVLSPLQLSPGAQLSQINNLSPMVMSSPPLPPQSSNPFLPNLQPLLFNNSVSFCVPAASGTRCPVCPAPSRPISSSAKWPTRLQNLKRHIKLCHPHISEVNKKCAACHAPFSKWYSHIKSCRLAQSLSLPPESPFDPIFICRTEGCGHSFASAAQRGQHERQHYSLYKVPPPIALPRATQRGAQNTWRDLNALKSQAHPPPSPDTAADASQPPTSSPTSTSSQPPPVSPQVSRLPTSSQSPQASLAPSLHSPPLAASQPTTPLSVSSSKMVSPAASQLPPPSSSLPQQTRIFWSSKFNKRRSFGNTPKSNLPLQASSNLSSSSSSSSPSSSTPITQTSSFPPLPLPASPQLSSDSSFPVSPHSRSTSRTLSSPPPSAHPDGIPISLSHLSLPLEPLGSYPSPAPLASVTAQLLATSSALSSSSLVASPPPASSSGYIIQSPVPPSVDVFSSPSGPPRPPPSPAPNVRGSTASSFAHSPPAPSSPNLTSGPSDAPSGYIIEPPLALDASSAPSPTQNPPPPPSASSLSLPHTPSMRGKLPEELESLRSRVYEASLLSVNPSNWSLVESLIDQTICKVQELSHIQPGSSYIPNRQSSSTHRTANEAKVSAIYKSNPRRALRVITQESGPRCHLPPSTISEHLFAPNTLPPAPDFYPPHDRPNLRADNFSPREVSERLQASTNSSPGDDRIGYDIWKRLDPQCRLLTVIFNACRKFRRIPLSWKSHKTVLIHKGGPTEDPSSWRPISLSNTAPKLYASLWARRLSDWLEKHDVLCPAQKGFRPFDGVFEHNYLVETLIGNAKIHKRDLSLAFVDLANAFGSISHDALFSSIEASGAGPIFLDIVRDLYSNCTTTLVTESGLSDPISLNQGVRQGCPLSPSLFNLTIDPILRAALDLSDLQVKGGAYADDIWLAASSPETIQLMINKISNLSRAIGVRANPAKSDFLNITAGLIDTSVNVNIDSSPIRTMAQFDYSRFLGKPVGYAVINSSDKIEQVAKLIEKVRDSHLAPWQKVDAIMAYLVPHLPFQFRMRKISHSDAANLDKWFRNTAKELLGLPDRASTSFLYSPRSGGGAGLPEFQKEALFAQVEGAFKLLTSRDRVVRELAAADLRHTVSVRIPRRAVEPSVIEEFFNGIAQVRSSGGKNVWTFARQASIQLGVNWILEPKEACLLPKLVSDESSLVIEPRHRHLVQRKLRKLQQDSRLKQWKGQADQGRAAHDLSLSGHRSGHFLRTGFHLRHSDFYWVFRARLNLLGGLRAGRPWDAGGEGLCRFGCVNRTSKVPWPESQAHVLNHCDRNMVKIRERHNQIVSLLKSAATAAGWLVVGEDTEFLVNRLRPDLVLTDSRKRCVRILDVAIPFEGGANSLEKSRKKKCDRYAPLVSAALAVNGITSAKVVPIVIGARGAWDPKNDAPLKELVHGDYLDHLRKMLISATIRSSHDIYTDHIHASPTDLPTRQTDTGAPASPDTQVQ

SEQ ID NO: 33063 - protein, 1024 aa, Sepia pharaonis
MAAIEHEALSKGVQHMNSYLTPFLARTRDQISCRRKKDDYKAILKSLESEAQCPGPDGSRARVVPDSPRNDHPTSGDLKSPKGRTGRKWSAEEIKVLQQAPRDVPDAELVPLLPGRTVQAIRSRRRRLVAQRAGPVGPAAQAPTDEEQVTAEPQPYERSMTESEQGISDYLYGILPNIPDPVVREKAKQAIGDPNGFSKLYNEFFPKNRTVSRRAMPAVKVGVKRRRAQRAIIYNFLQNLHKRSPKSVAERVLDSDLSYEGLVAERAFSDEDFLRKWKPVFERPCYADLAGDHPGPPLNELAAPIKVADVAAVIASLKESSPGPDGLRLNILRGIPVEVITFLYNLLLLKGPPPTRGKAGNIFTSRVTFIKKVEVPGDALEFRPIAIGNYFVRIFHRVLASRFEAALPNHRDQVGFKRLDGVAHNVLKLNAALNAARSKHENLVVASVDIRKAFDSISHEAILGILQRKGVPDLLMGYLRTYFSTSRLQIGKDLIHPKHRGVKQGDPMSPWLFNLALDQILEGQEEYAITIGAIVLNQMAYADDLILFASSQEEMQKRIERLTIGLGRLGLELNARKCCVLSIRGDKKRKFSFVDTDVSISVDGTRLPVVTAVSEFRYLGVQFNWKGVARTPLDLEKLLVRLNRAALKPQQKLIVLKKFLLPRLQHQLTFGRLHKGELVKGDKAVRRVVRRWLRLPADCPNSAIHTPARFGGLGVNSLETLYSTLKESRLTQLSYGDEEDAAIASNPAVRGLMSYKFRGSVMSSREGLVEDLHRRLDTRGLQGYEKVPAVNSWLDHAPTNLAGHDFQEAIRVRLGCMGTPSRLSRGGRSVDTICKCGSNARMSLPHIAQACSIVSGLRIKRHNNVVLYVAQILKEKKYDVIMEPRLQTERGLRKPDLVILAKKEIIVLDVQIRPDSVVCTLDACNREKIAKYNQPYVLDAIRDRFGHGLPIKVIALTYNWRGAAAQQSYQDCITNKLLRWRHFGPISRMILRDTARMLWAYWHAPADGATRPTASAEVLMDCAE

SEQ ID NO: 33064 - protein, 900 aa, Microceris scylla
MSRRNPSGLAPPVGEGSSQPHPIDKDLPFICDFKDCYRAFRTKAGCSQHQRKAHKEWYDARQVADHPHKRTRWLEEELSILARVEAELTIAGKRFMNQALAGYTERSVEAIKGQRRAQKYKDLVKHFIDRIHKESENKTPKSCCPPQQDSTSEPQEQPFMDALKTLIDEFGSATNTDLTCLCTDIGTKATAERRLVLERYLKRFSRHIKPNLERDTSNINAQLSRKKERRLAYMRTQKQWMQNRTRCIRQVLGDIKTATSAPSQNIMIPYWTNVMRTNNCSSPGYRTPQTVYESIWAPIRVEDLQGCYPPLHTAPGADGFSSGTLSKIPPHELSIVFNITLLCDRPPQSLLQSRTVLIPKKDYATDPGDFRPITVSSVFIRMLHKILGRRIQASIKIDERQRAFRPVDGCSINTYLVDLALRYHRKKFKPLFMASIDISKAFDTITHNSITDTMLHYGCPASLVDYIKKNYQCSETRLSCGTWKSDYIHPTLGVKQGDPLSPILFNLAVDRLITNFPDHLGVKIGDLKMNAAAFADDIILFASTKKGLQTLINTADTTLGTMGLRINAAKCHTISYTTVPGMKRSAVDATINFTCGGYQMPALARASQWRYLGVDFSAEGRQRGKALDIIRNKLNILTKAPLKPQQRLFALRTMVLPGVYHNLTLGETSISHLKSIDALVRKSVRKWLFLPVDSPSAYIHADYKDGGLSIPSLRWTIPELRMRRLLVLKNIPHSYTLMLDREIDICERRLNDHGTNLLDMQSILKRWARKLHQHVDGTSLSASRKVPQQNQWITEGTRFLSGRDFLNSCKLRINALPTRSRCARGRPHKDRECRAGCQAMESLNHILQICHRTHATRVKRHDAILDHVAEKLRKKGLQVLREPRIQTDEGIRRPDLVAYA

SEQ ID NO: 33065 - protein, 1123 aa, Hypermnestra helios
MRCYFKATRLEEQLVGHRTEMYRLFVLKYPELRERVTEQRVMDQKRHILCTCKIATERLEQLKAEVAAELHPGRDVLEDISAQEASSTMDASLEIISNSLTEQNTAPQEEPSEPKMETEILRNLREEFAKALTEFLGTNPLLRPTITRQNNSKKLAIAVNMMNTTIIPEHLERVENSFDAVHTTIYAASVAIVRSTGGKIGDSTVQSVTERKTPAWERRLIHEVDTLRRQLGRLTQYMRGNRSNKVIAAYHELQKDMTKHTKYDPPNRTDGDILDTLRQKLALKSNRLKRYRKSRKRREDNALFTKNEKLFYRRLRKNVEDTNGPPPRRDEVEKFWRSIWSEEVSHNENATWIQREEQRILEIPLMSRVEITEEDVTQAVYKFLNWKATGPDKIHNFWLKKLTVLHKPLVKCFTSFIRDPHKVPSYLTIGTTYLLPKDVNTQDPAKYRPITCLSTLYKTLTSCLSNKIYQHLGHNSLLATEQQGCIKRSQGCKEQLTIDSVATGQAYQKSRKLQMAYIDYKKAFDSVPHSWLSKVLKLYKIDSEIVALLGYLMSNWATSLHLNHGHNQKITTGCIPIKRGIFQGDSLSPLWFCLALNPLSSILNETGHGFLIKGDGGNHRKLTHLMYMDDIKIYAANDRELRTLLHCTEQFSNDIKMSFGFEKCRTLNVYRKRIELSEGFELQTRERIDAMVENDTYKYLGILQSLRIQHADIRSEMTEVYNQRLKMILSSGLNGGNLFKAINTYAIPVLTYTFGVVNWSETELEKVERSTRVMLTKYLAHHPKSSVERVTLSRTKGGRGLIDIRRLCVKQVQGLRKYFLAQTSSPLHQAVIKADDRLTVLDLLHADNIPPLETDAEYKEAKFRQWASKPLHGRFANELSQHHVDIEASNTWLRHGDIFAETEGFMVAIQDQVIPTRNYLKYIVKTGIEDDHCRRCHQKPETIQHITGSCQALAGTEYIQRHNNVAKIIHQELAVKHGLLKEAEPYWKYNPTPVLENDSTQLYWDRSVLTDRSVEHNRPDIILVEKKEKRTILIDIGIPNSHNVQQYTTDKMVKYQRLAEEVKQLWRQQQVLIVPLILSSTGVVPKSLTENLTKLDIAVKVRNKIQKAVILDTTAIVRRHLSI

SEQ ID NO: 33066 - protein, 1189 aa, Dusona sp.
MVRCICGKEFATEAGMRSHISRRYCRGAAPDLENRCNYCRENEISRTFPTYIGLRQHIRHAHPMEFNRELEHQVENPVRSASRWSDEETLRMARLEVAYDGRFINKHLAAILTTRTLQSIKSRRRQEDYTELLRDLRRGQPMVTDIEEEVLGISGDGLCEATAEEQQDAPLDLSLGRSSNVSITTERCVSVADAVRTINTSMSSHSHPEAPPPILELVDEHCVSVTDTVNSSRRANITPESPHLDILSSTAIAGNSPPPSDGPLLALRRINISGFCCSTVIATHSNVPPLPAPAAVSSSHTASADMFDHLDQRDPVAVFLAAHAASEVPWSEGDRWITGALSRDGLLVSDRAFALNKWLDNVYSSIRDRTSRPGGRRRPLRSNRPPPRELKDPNPDRDFRKNKSRAALFRKTQDLYKKNPKELAECILDDKPIGTEVDLPSFDAVVQKYAEIFGDPSPVDNEEIGDPKSVIDESYGPISADEVELALRTTTSKSAGPDGLRISHVRGIPVHSLVLAFNAMLLWGLIPARMKQCRTVLIPKGGDTTCPDNWRPITVSSVLLRLINRIIGLRLGNLPLHHLQRGFRKIDGVVANNISLDTIIRRRREEHRPYSLIAVDLRKAFDSVSVNSVVRAMSRFRLHPRLQEFILDGYRGAHTYLQLGSRKSESIRLSRGVKQGDPLSSYLFNMVIDELICHLANTSYGIDLGSKRVPCLAYADDIVLIGGDVKEAQALLRSTAQFLSRRSLTVNVKKCAATSVGIVPGKKQCYTITKNTFSLGCELIPQLSSLAFFKYLGTNIGSLGISQPYIGDVKLQLLRVEKSPLKPHQKLKLIKTYLMPRLLHLLQNPRSTIKILKETDKLVRMSVRRILHLNRTCADAFVHAPCRLGGLGLQSMRAVVPIILGQRLVNVTSGGDTYAQELLLETSFQKVVRRLGQWCTPYGDTTARAGRRWGDLLEGSYSGNGLRQGSNNSHSGSWIDHPPAFWSGAEFVKAVQLRGNLLPTQGIPSNPPDQRRCRGGCIGRTESLCHVLQRCPVTHWARIKRHDRVANIVKQAAGRKGWTVESEPQIRCANGMLRKPDLALSRGGEVVIVDVAVSWEGPNSLGATYLHKQGTYSVPEVISALQRRYPGKSIKVEALVVGARGIWCPQNNAVVSALGLSQADVRNLVIAAINGSVLVHKEFMRSMFYRDSG

SEQ ID NO: 33067 - protein, 1200 aa, Venturia canescens
MVRCICGKEFATEAGMRSHIARRYCRGAAPDLENRCLLCRENDISRTFPTYIGLRQHVRHAHPAEYNRELEDQVENPIRSASRWSDEETLRMANLEIAYEGRFINKHLASIMTRRTLESIKSRRRQNDYIELLRDLRRGQPVIADIEEELLGNALEAGNASSTASEGPQDAPLDLSMGRTANASITTENCVSVADAVHDINASLSQTSYSNPPPTVPEFIEERCVSVSEAVNASRRAHSNGVSSPHFAPDILSSTAWIENQSSPTGRLVRMPHNIDISDIQHRDAIAPFSSASRPETAVPLSVDTTGLPPRTAGVVSPSHHSRHDSISVFLTSLVASNVTWSETDRQIIDVLGSTSPLVSDQALALNKWLDHIYLGAQDHAPRPSRRQRPLHPNPRSSTRTRKQPTRREFSKGKTRATLYQKTQELFKKNPKELADCIIGDKPIGSTLELPPFDAVVQKYADIFSDPSPEDNEDIKEFRPVTDGLYEAITADDIELALRTTTSNSAGPDGFRISHARRIPTNSLVLFFNAMLLWGLIPARMKQCRTVLIPKSGDTRCPDNWRPITVSSILLRLINKIIGQRLGDLPLHHLQRGFRKIDGVIANNITLDTIVRKRREEHRSYSIIAVDLRKAFDSVSVNSVTRAMSRFRLEHKLQNFILEGYRGAQTYLQLGPEKSDSIRLSRGVKQGDPLSSYLFNMVMDELLHELANTSYGIELGSKRIPCLAYADDILLIGKNSKEAQALLKITARFLERRSLAINVRKCAAVSIGVVPGKKQCYTVTRNIFSLGAELIPQMSPCDFFRYLGNNIGSLGVSQPYIGELKLQLLRIEKAPLKPQQKLKLIKSYLVPRQLHLLQNPRSTIKILKETDKLIRMSVRRILHLNRTCADAFIHAPCRFGGLGLQSMRAVVPIILGQRLTNVASFGDSYSQELFFEASFQKLVRRLGQWSSPYGNTTAAVGRKWGDLLESCYSGNGLRQGSCSSHSGSWIDHPPPFWSGSEFVKAVQLRGNLLPTQGIPSNPPEQRRCRGGCISRTESLRHVLQRCPVSHWARIKRHDRVVNILKQVANRRGWSAECEPHIRCANGLLKKPDLIFCKEDRVFVVDVAVSWEGPNSLGATYLHKQSTYNGPDMMSALQRRHPGKIIRVEAIVIGARGIWCPQNDVLVRALGLPQADVQKMIIATINGSVLVHKEFMRSMFYRGND

SEQ ID NO: 33068 - protein, 1379 aa, Helias cama
MEKVHVSKYNLRPLPGGRRGALGAGAECHSMRTIGDGGLSRRAPLEENTTAENTSSCSSPSSLFSSLPSSPPSYLDHSLSPLSITSSPISHSTTEDVVQVFHDTNSTAPAKVSSRTRIRWTDDMNSFIWRTYLILTSLESNTRTYLTELHAKFSEHFPNIHVTKQRIGDQRRAIIRNKLLSKDNIERIRKEAEIYINKLNLHRKETEGSSRDETETQSTNQRFRWSNDVNETIIRSYYEITQLETNKSAYRQQLHQLVISKHPNIAHFSEQRIADQRRVIIHNKMITSERLQQIRDEVAKTIQLNSCLSTRTHIPQSSNTENSSCRHEPIQNSENIGLTNAAETIEGEIEEVDNVEQHVEKNPDIDEMFHECLVYFSDTHPINRPFIPKQRATKQLAKLTQYVNKIILPGNVNKETSFEQLQTIIYSAAWTIAKLNGSKMSKEPIEEISRTSENIKPKWRLRLERRIEKLRAQIGKMTHYINGNRSIRLTEQVNTIMNQHSIHSTHEEPNSRLHHFLDTLKQKLKVASKRLSRYIACTLRKTQNFQFINNEKKFYRTIKENTTNIQSHINSVQSKPSPVDLRNFWASIWENPIEHNNEADWIASEVDCSEKIEPMNFECIPAECFQDTLKQLHNWKAPGSDHIHNFWYKKFTFIHPFLYKHINHFIQCPQSLPKYITEGVTYMIPKEQNNLLDPAKYRPITCLQTIYKIITSCITHTIYSHITTNKILADQQKGCRKFSQGCKEQLTIDAIIHKKVQKDKSDLYTMYIDYKKAYDSVPHSWLTKILEIYKIHPTLIHFLKNIMLNWNTKLKLDNITTDSIKIRRGIFQGDALSPLWFCLALNPLSNVLNSQKIGYTLKYYQNDIEYEYTQNHLLYMDDIKLYAYTESELSQLTNNTEAFSDDIRMEFGIDKCKINSFKRGQKYQYQHDLNSGKKIEPLKDGDTYKYLGFQQSQQICHKEIKATLTTTFKHRLNTILASQLNSRNTIKAINTFAISILTYSFGILFWTKGELRNLQRTINTSMTRHRKHHPRSCVQRLTLSRTDGGRGIIDIINLHNNLIHSLRSYFHNTDGSSLHKAIVQNDRKYTPLNLQDTSQQKNEIQTDRQSKIDEWTKKSLHGRHRHDLCQSNVDIEASNAWLNRGELFPETEGFMVAIQDQVIETQNYKKHIMKIPATVDSCRRCHAATETIQHITGACRAIVQTDYKYRHDQVANIIHQNLVHKYKLIEQSYTAYYKYTPDTVLENSKYKLYYDRAILTDRTSHYNRPDITVIDKTNKTAFIIDIGIPNTHNLQATISEKISKYTDLKDEICRMWNLRKATIIPIVLSTTGVVPKQLHHALSVLKLPPHLYCLMQKAVILNTCRIVRKFLQSEHTYNGIHLT

SEQ ID NO: 33069 - protein, 1384 aa, Timochares trifasciata
MEKVNVIKYNLRPLPGGRRGALGAGAECHSMRTIGDGGLSRRAPLEQHTTAEIENSSCSSPTSLFSSLPSSPPSYLVSDCNLSPISILSSTTSHSITEDVVQVSYDTNATAPAKVSSRTRIRWTDEMNSFIWRTYLIVTSLETNTRTYLTELHKRFCEQFPNIQVTKQRIGGQRRAIIRNKLLSTENIERIRQEAEIYLNNPDPCPEQAVDASKNKTVTQKTSQRFRWSNDINETIIRTYYEITQLETNKSAYRQQLHQEVILKHPNIAHFSEQRIADQRRVIIHNKMINNERLDQIREEVAKKIGSNILVPNLHTHIDQTDNPVNATPGHETIQVNYNVGLIDINSIDIIENENEEGETVEQSTQREPEIDKMFNEALINFCDTHPTNRPFIPKLRSTKKLARMTQYINKILLPEIINKDTPFEKLQTITYSAAWTIAKLNGAKVSKEAKEEVNRNNRKVKPKWRLRLERRIEKLRAQIGRMTHYINGNRSSRLTEQVKVIMAQHRIHSIHEEPNSEVTHFLDTLKQKLKVVSKRLERYVACTLRKTQNRQFLNNEKKFYRTIRDTATNIQPSNNNRTPTEPSPIDLHNFWSSIWEDPIKHNEQADWITSEIERSAKVTPMNFECITAEAFQDTLKELHNWKAPGSDHIHNFWYKKLTFIQPFLYRHINNFIKNPQNLPEYITEGITYMIPKEQSNLLDPAKYRPITCLQTIYKIITSCITHTIYTHINANEILADQQKGCKKFSQGCKEQLIIDAIILRQVQKQKLDLYTMYIDYKKAYDSVPHSWLTQILDIYKVHPTLICFLKTIMLNWHTKLKLDGIETNSIKIQRGLFQGDALSPLWFCLALNPLSNILNSQKIGYNLKYYQGNIRYTYIQNHLLYMDDIKLYASTESDLHQLTNSTEIFSNDIRMEFGIDKCKVNSFKGGQKYQHYHDLYSGKQIEPLGEGDTYKYLGYQQSQQICHRYIKATLTTKFKHRLNTILGSQLNSRNTVKAVNTFVISILTYSFGIIFWTKGELKNLQRTINTSMTRYRKHHPRSCVQRLTLSRTDGGRGIIDVTNLHNKLIKSLRSFFHNNILKSTLHAAIVQNDRKYSPLNLHDFTQQKNEVQTDRQLKIDEWTKKTLHGRHRHDLSQSNVDIEASNEWLKRGELFPETEGFMVAIQDQIIETQNYRKHIMKIPSSVDSCRRCQAATETIQHITGACKAIVQTDYKHRHDQVAKIIHQNLAYKYKLTTQPYTAYYKYTPDSVLENSKYKLYYDRAILTDRTSHFNRPDITLIDKSNKTALIIDIGIPNTHNLQNTISEKISKYADLKDEICRMWNLRKATIIPVVLSTTGVIPKQLHQALSALNLPPYLFCLMQKAVILNTCRIVRKFLQSEHSMMLT

SEQ ID NO: 33070 - protein, 1349 aa, Cycloglypha thrasibulus
MRTIGDGGLSRRAPLEEITTAEIENSSYSSPTSLFSSLPSSPPSYLANDCNLSPVSVISSTISHSITEDVVQVSHDTNSTAPAKVPSRTRIRWTDEMNSFIWRTYLILTALESNTRTYLTELHTKFCEQFPNIQVTKQRIGGQRRAIIRNKLLTIENIERIRKEAETYLNNQDLCEEQVDYTNRNNTVPQNTSQRFKWSNDINETIIRTYYKVTQLETNKSAYRQQLHQQVILKHPNIAHFSEQRIADQRRVIIHNKMISNERLHQIREEVAKDIESHTSFPSAHTFIDQTLSTNAEHASPRHDIIQENVGLIDIYNIDIIETDSVEGGRVDQTIKRDPAIDKMFNEALMHFCDTHPTKRPFIPKQRSTKKLARISQYMNKMLLPEFVNKETSFEKLQTIIYSAAWTTAKLNGSKMSQEVIEEVKRSNRNIKPKWKLRLERRIEKLRTQIGRMTHYINGNRSSRLTEHVNLIMTQHKIHSTHEEPNSELSHFLDTLKQKLKVASKRLERYVACTLRKTQNSQFLNNEKKFYRTIRDTTTNIQSNNNSRIPNKPAPVDLHNFWSSIWEDPIRHNEQADWITLEIEHSSKITPMDFECISAEAFQDTLKKLHNWKAPGSDHIHNFWYKKLTFIHPFLYLHINNFINNPQNLPDYITEGITYLIPKEQNNHLDPAKYRPITCLQTIYKIITSCITHTIYTHIDTNEILADQQKGCKKFSQGCKEQLTIDTIIHKQVQKQKLDLYTMYIDYKKAYDSVPHSWLTQILEIYKVHPTLIIFLKTIMLNWNTKLKLDAIETERINIRRGLFQGDALSPLWFCLALNPLSNILNSQKIGYNLKYYQNNKQYTYVQNHLLYMDDIKLYASTELDLHQLTNSTEVFSKDIRMEFGIDKCRINSFQGGQKYQHHHNLNSGKRIEPLGENDTYKYLGYHQSQQICHKEVKAALTTKFKHRLNTILGSQLNSRNTIKAVNTFAISVLTYSFGIIFWTKSELKNLQRTINTSMTRHRKHHPRSCVQRLTLSRTDGGRGIIDVINLHNKLINSLRSFFHNNTLKSTLHAAVVQNDRKFTPLNLQDLTQQKNEVQTDRQFKIDEWTKKSLHGRHRHDLSQSNVDIEASNEWLRRGELFPETEGFMVAIQDQIIETQNYRKHIMKIPSTVDSCRRCHAATETIQHITGACRAIVQTDYKHRHDQVANIIHQSLAHKYKLITQHYTPYYKYTPDTILENSKYKLYYDRAILTDRTSHFNRPDITVIDKINKTALIIDISIPNTHNLQTTISEKISKYADLKDEVCRMWKLKKATIIPVVLSTTGVVPKQLHQALSALNLPPHLYCLMQKAVILNTCRIVRKFLQSDT

SEQ ID NO: 33071 - protein, 1384 aa, Ebrietas anacreon
MEKVKVSKYNLRPLPGGRRGALGAVAECHSIRTIGDGGLSRRAPLEQNTTAEIENSSCSSPTSLFSSLPSSPPSYLANDCNLSPMSIISSTISNSTTEDVVQVSHDTNSTAPAKVPSRTRIRWSDEMNSFIWRTYLILTSLESNTRTYLTELHKRFCEQFPNIQVTKQRIGGQRRAIIRNKLLSTENIERIRKEAEIYVDNLNLCKEQVDYTSRNNTVPQNTSQRFKWSNDINETIIRTYFEITQLETNKSAYRQQLHQEVILKHPNIAHFSEQRIADQRRVIIHNKMINNERLRQIREEVAKKIGTHTLCPSVNTFIDPTISTNAENASPRQDIIQENVGLIDIYNIDITETENTEGDSVDLTIKREPGIDKMFNEALIYFCDTHPTNRPFIPKQRSTKKLGRISQYINKMLLPEIINKETPFEKLQTIIYSAAWTIAKLNGSKMSKEVIEEVNRNNRNRKPKWQLRLEQRVEKLRAQIGKMTHYINGNRSSKLTKQVNLIMAQHKIHSTHEEPNSELSHFLDTLKQKLKVVSKRLERYVACTLRKTQNNQFLNNEKKFYRTIRETTTNIQSNNNSRTLTKPTPVVLHNFWSSIWENPIKHNEQADWITSEIENNSKITPMDFECISAEAFQDTLKKLHNWKAPGSDHIHNYWYKKLTFIHPFLYLHINNFIKNPQHLPDYITEGITYMIPKDQNNLLDPAKYRPITCLQTIYKIITSCITHTIYTHINTNEILAEQQKGCKKFSQGCKEQLTIDTIIHKQVQKQKLDLYTMYIDYKKAYDSVPHSWLTQILEIYKIHPTLILFLKTIMLNWNTKLRLDAIETDCIKIQRGLFQGDALSPLWFCLALNPLSNILNSQKIGYKLKYYQNNKQYTFIQNHLLYMDDIKLYASTEAVLHQLTNSTEGFSNDIRMEFGIDKCKINSFKGGQKYQHHHSLNSGKEIEPLGEDDTYKYLGYHQSQEICHKEIKAALTTKFKHRLNTILGSQLNSRNTIKAVNTFAISVLTYSFGIIFWTKSELKNLQRTINTSMTRHRKHHPRSCVQRMTLSRTDGGRGIIDVTNLHNKLIHSLRSFFHNKTLKSTLHTAIVQNDRKFSPLNLQDLTRQNNEVQIDRQLKIDEWTKKSLHGRHRHDLSQSNVDIEASNEWLKRGELFPETEGFMVAIQDQIIETQNYRKHIMKVPSTVDSCRRCHAATETIQHVTGACRAIVQTDYKHRHDQVANIIHQSLAHKYKLLTQPYTAYYKYTPDTVLENSKYKLYYDRAILTDRTSHFNRPDITVIDKINKTALIIDIGIPNTHNLQTTISEKISKYADLKDEVCRMWKLKKATIIPIVLSTTGVIPKQLHQALSTLNLPPHLYCLMQKAVILNTCRIVRKFLQSEHLMILT

SEQ ID NO: 33072 - protein, 1349 aa, Chiomara georgina
MRTIGDGGLSRRAPLEQHTTAENESSCSSPSSLFPSLPSSPPSYLDHNLSPISTTSSTISHPTTEDVVQVSHDTNSTAPAKVSSRTRIRWTDEMNSFIWRTYLILTSLESNTRTYLTELHAKFCENFPRIQVTKQIIGGQRRAIIRNKLLPLETTERIRKEVEIYLQNLNPNIEQTECINTNKTDTHNTNQRFKWSNDINETIIRTYYEITQLETNKSAYRQQLHQVVISKHASISHFSEQRIADQRRVIFRNKMIPIERLQEIRDEVANTLGINSCSPTVQTPITHSTHAENELYRREPTQSSENIELTNITESAVTENLEIDNLGQSLKRDQKIDDLFNETLTYFRNTFPTNRPFIPKQRATKKLANITQYINKMLLPEIVNKETPFEQLQTIIYSAAWTIAKLNGSKLSKKVTEEVNRDTKNIKPKWQLRLEQRIEKLRAQIGRMTHYINGNRSSRLEKHINLIMAQHRIHSTHEEPNSQLHHFLDTLKQKLKVASTRLDRYVACTLRKIQNNQFINNERKFYRTIKDTTANIQSNNNCRANTKPSSVDLHNFWANIWENPIAHNKNASWIESEIEHSAKIEPMHFECITAETFQDTLKQLHNWKAPGSDHIQNFWYKKLTFIHPFLYKHINNFIKNPQSLPHYITEGVTYMIPKDQSNSLDPAKYRPITCLQSIYKIISSCITHTIYTHINTNEILADQQKGCKKHSQGCKEQLTIDAIIHKQVQKNKLDLYTMYIDYKKAYDSVPHSWLTQILEIYKVHPTLICFLKKIMFSWNTKLKLDNIFTDSIKIRRGLFQGDALSPLWFCLALNPLSNILNSQKIGFNLVYHQDNNQHKYIQNHLLYMDDIKLYASTESDLHQLAYTTEIFSDDIKMEFGIDKCKINSFKLGQRYQHHHDLNSGEHIEPLGENDTYKYLGYQQSQQICHKEIKATLTTKFKHRLNTVLGSQLNSRNTIKAINTFAISVLTYSFGIIFWTKGDLKNLQRTINTSMTRYRKHHPRSCVQRLTLPRIDGGRGIIDIVNLHNKLIQSLRSFFHNNSPKSNLHAAIVQNDRKYSPLNLQDLTPQKNELQTDRQTKIDEWTKKSLHGRHRHDLSLTNVDIVASNEWLKRGELFPETEGFIVAIQDQIIETQNYRKHIMKIPSTIDSCRRCHAATETIQHITGACRAIVQTDYKHRHDQVTNIIHQNLAHKYKLTTQPYTAYYKYTPDTVLENSEYKLYYDRAILTDRTSHFNRPDITVIDKINKTAFIIDIGIPNTHNLQATISEKISKYTDLKDEICRMWSLRKVTIVPIILSTTGVIPKQMHQALSVLNLSSHLYCLMQKAVILNTCRIVRKFLQQEHTMVLT

SEQ ID NO: 33073 - protein, 1356 aa, Cycloglypha thrasibulus
MRTIGDGGLSRRAPLDKHTTAEIENSSCSSPVSLFPSLPSSPASYLNNDCNLSPMSITSSIISHSTAEDVVQVSPDTNSTAPAKVSSCTRIRWTVEMNSFIWRTYLILTSLESNTRTYLTELHTKFCEQFPNIKVTKQRIGGQRRAIIRNKLLSTEVIENIRKEVEIYLNNLPINLDTQQTTCTAINKTTTQDTNQRFRWSNDINETIIRSYYKITQLETNKSAYRQQLHQEVISKHPNISHFSEQRIADQRRVIIHNRMISNDRLLQIREEVAKIIGSNSLSCSTQENIAQILSTNTENIPRTQALNQVSEKVVSTDGNTISTITENEETDFVEQLATKDPDVDKIFYETLTYFCNTHPTKRPFIPKQRATKKLAKVTQYINKILLPEVVNKDTTFEHLQSIIYSAAWTAAKLNGSRVLKEPNEDESRKCRNIKPNWQLRLERRIDKLRAQIGRMTHYINGIRSSKLTEHINLIISQHRIHSSHEEPNSQLHHFLDTLKQKLKVASKRLNRYVACTLRKTQNNQFLSNEKKFYRTIRDTTTNIQFCNNNSQAKPSPVDLRNFWANIWENPVRHNDQADWIISETENSATIQPMEFECIPVETFRDTLRHIHNWKAPGSDHIHNFWYKKLTFIHQFLYHHINNFIKNPHDLPEYITEGITYMIPKEQNNLLDPAKYRPITCLQTIYKIITSCITHTIYTHINSNEILADQQKGCKKFSQGCKEQLTIDAVIHKQVQKNKSDLYTMYIDYRKAYDSVPHSWLTQILEIYKVHPTLTCFLKTIMLNWNTKLKLDDVKTDSIKIRRGIFQGDALSPLWFCLALNPLSNILNSQKMGYNLKYYQNSDQCQYTQNHLLYMDDIKLYASTESDLHQLINYTEVFSNDIRMEFGIDKCKINSFKLGQKYQHSHNLSSGTQIDPLGEGDTYKYLGYQQSQQICHKDIKATLTTKFKHRLNTILGSQLNSRNTIKAINTFAISILTYSFGIIFWTNSDLKNLQRTINTSMTRYRKHHPRSCVQRLTLSRTDGGRGIIDIINLHNKLIKSLRSYFHNNTLSSTLHNAIVENDRKYTPLNLYDLTQQKNEIQTDRQTKIDTWTKKSLHGRHRHNLCQPNVDTTASNEWLRRGELFPETEGFMVAIQDQVLETQNYKKYIMKIPSTIDTCRRCHAATETIQHITGACRAIVQTDYKHRHDQVANIIHQNLAHKYKLTTQPYTAYYKYTPDTVLENSNYKLYYDRAILTDRTSHFNRPDITVIDKVNKTAFIIDIGIPNTHNIQTTISEKISKYTDLKDEVCRMWNLKKVTIIPIVLSTTGVIPKQLHQALSVLNLPSHIYCLMQKAVILNTCRIVRKFLQSDHAMVLT

SEQ ID NO: 33074 - protein, 1281 aa, Timochares trifasciata
MEKVSVRKYNLRPLPGGRRGALGAGAECLSMRTIGDGGLSRRAPLEQHTTAEIENSSRSSPISLFSSLPSSPPSYLDNDCNLSPMSITSSTISYPTTEDVVQVSHDMNSTAPAKVPSSTRIRWTVEMNSFIWRTYLILTSLESNTRTYLTELHAKFCEQFPSIHVTKQRIGGQRRAIIRNKLLSAEVMESIRKEVENYINLHKDQSTCTTINKIATQNLNHRFRWSNDINEDIIRSYYRITQLETNKSAYRQQLHQEVISKHPNISHFSEQRIADQRRAIIQNRMISNDRLQQIREEVAITIGSISFLSSTQINVSQISSTNTKNTPCSRAIQQVSENVGLTDVNRIITVADSEDTNSVDQHIEKDPAIDEIFYEALTYFCNTHPTRRPFIPKQRATTRLAKTTQYINKILLPEVVNKETSFEQLQNIIYSAAWTVAKLNGSKLAKEPNEDMSRNSRNVKPKWQLRLERRIEKLRAQIGRMIHYINGNRSSRLTEHVKLIMNQHIIHSTHEEPNSRLHHFIDTLKQKLKVASTRLNRYVACTLRKTQNSQFVSNEKKFYRTIRDTTTNIQSYNNSTQTKPSPMDLRNFWASIWENPIRHNEQADWIASEIEHSAKIQPMEFECIPVETFQNTLRQLHNWKAPGSDHIHNFWYKKLTFIHPFLYQHINNIIKDPHNLPEYITEGITYMIPKEQNNLIDPAKYRPITCLQTIYKIITSCITHTIYTHINTNEVLADQQKGCKKFSQGCKEQLTIDAIIHKQVQKNKLDLYTMYIDYKKAYDSVPHSWLTQILDIYKVHPTVICFLNTIMQNWTTKLKLDTIETDSIKIQRGIFQGDALSPLWFCLALNPLSNILNSQKIGYSLKYYQNENQYEYIQNHLLYMDDIKLYACTESDLHQLTNSTEVFSKDIRMEFGIDKCKINSFKLGQKYQHHHNLSSGTQIEPLGEGDTYKYLGYQQSQQICHKEIKATLKTKFKHRLNTILGSQLNSRNTIKAINTFAISILTYSFGIIFWTKSDLKNLQRTINTSMTRHRKHHPKSCVQRLTLSRTDGGRGIMDIINLHNKLIQSLRSYFHNNTLTSTLHNAIVENDRKYSPLNLSDLNQQKNEIQTDRQTKIDNWTKKSLHGRHRHDLCQPNVDILASNEWLKRGELFPETEGFMVAIQDQVIETQNYKKHIMKIPSTVDSCRRCHAATETIQHITGACRAIVQTDYKHRHDQVANIIHQHLAHKYKLTTQPFTTYYKYTPDTVLENSNYKLYYDRAILTDRTSHFNRPDITVIDKATKT

SEQ ID NO: 33075 - protein, 915 aa, Ophraella communa
MENNERRENKQPPWEKRLKNKIEKLRRDIGKMTQLSKQTKPKSKLRKEAEEIIHRTQNNENRTPMDILDLLKKRLAASSKRLRRYKQAHKRRIDNHTFNTNQRTFYRNLEKGNTNQQEANTPVPEKEEVLAFWKGIWEKEEAHVNNKRWIIEEKKRYQNTKVMRDNTITLEEVKVAIKKTHNWKAPGCDAIHNFWYKKLTITHQKLTEHLNKIVESPENIPSFFTKGLTYLLPKTDRPSQDPSKYRPVTCLPTIYKLLTSIITSKIHRHIDTNKILTEEQKGCRKKAQGCKEQVLIDSCVTRNAEKHNLDLHVAYIDYMKAFDSVPHSWLTQVLHIYKIDQNIIRLLECTMSSWRTTLQLITANNTQQIGQVDIKRGIFQGDALSALWFCLALNPLSNQLRNTPGYTLKPTEETLTHLIYMDDLKLYAAKREHLNKALNITCKFTADIKMGLGVDKCKINTLKKGKWVEERSYTVKDSEEITHMQQEEMYKYLGFMQTNNIQHQHTKQTVTKKMISRIKNVLKTRLSGANTVKAINAHALPVVTYTFGIIKWTDTELEELNMKVRTTMTKFRAHHPKASKIRFHLPRQLGGRGILDLRNMHYTQILKLRNYMYTKATSSTLHKAITQIDQAYTPLNLKNKTFNPTEKIVDNHTKLNQLAEKQLHGKHHALMKEAHINTTYSYTWLKRTDIFPETEGFLLAMQDRVVATRNYRKYIMKEQVENEMCRLCSKTTETIEHIVSGCTNLAATSYITRHDNVGKIIHQILLKQIDPDHNNQPYYKYTPATTIITDTHTLLWNKSIQTDTTITSNRPDITLTDNRNKTTFLIDIAIPLAENIDKKHREKITKYLPLAQEVKEMWTQNSVRIVPIIVGATGEIPHRLRDSLATLNIKDETYIQLQKAVIIDTCSLTRKFLNQ

SEQ ID NO: 33076 - protein, 1051 aa, Ophraella communa
MVLCICGKNFASESGLQNHLKRLRCRGAPSADDNVCNSCGRSFKSYSGMRQHMRKSHPVEYNEELENRYETPDAPPMLDDLDLINMAKAELNFNGKFINQYLHSLYPHMTIDSIKYRRKTNKYKEYISSLRAEHNIEAREDILEQLEDERLRPQQQAEGEVVEISILESPTGRGRDSLNPNAEVFVPLAAEHRHKISVFLNNYWHSKDEWTSQELALYTYTQLTDYERHKSEVSKKVNEYIAALFTNSARTGKPKTKASTEHKAPVFHSKNHERAYQYKVVQRRYRSNQAALARDIIDGKPLWGSDVYPSISSVQADYKGIFERLSPLDNEPISDRKTEHALDQPITESEVLWAIKTSKSNAAGPDSVTLSDIRKAPIQKLVLLYNVIFLFGVTPEVLRENRTTLIPKGGDRREVKNWRPITISSIIVRVLHRVLSTRFASLPIHDNQRGFMKIDGVLLNNLTLQTLIKERRHRLKPYNILSLDLTKAFDTVSQWSILRALNRFGIDETTKRYVMGSYEKSFTTISAGNKRTRRINIDRGVKQGDPLSPYLFNLVVDELICELENGGDGITVSNDIKVSVLGYADDLILLAESARGGSRQLKTVTEFFAKRGMSINPSKSVAITVNVNRGNKHSYAITRPLFAANGQSIRQLPPGQLFKYLGGRYDVMGQTAPTISDLKEQLSRIDKAGLLPAQKLNIVRTYLLPRYIHHLQSAIVTLKILKSADKIVRISVRRFLGLNRTCADAFLHAPIREGGLGVTNLALQVPAIMRRRITNLISRANITTAAVLSLPYSERLYNKILRWTHNNGGSSSIIARQMAERLEEGYSGNGLRQGNVSTESGSWVNNPPPYWSGSDFKKAVQLRGNLLPTKSIPSNPLAERRCRMGCNRNETLCHVLQGCPVSHWRKIKRHDQLVTHTRKIAEKKGWIVELEPRIRCSDGALRKPDLVLQMGDTVVVCDVTVSWEGPDPLSVAAANKVALYSEPRFLSVMTSRYPGKNIVVTPLVVGARGTWCAENNQISNILGLSKQDIRSYITKTIIGSISIHRYFMSQT

SEQ ID NO: 33077 - protein, 1051 aa, Ophraella communa
MVLCICGKNFASESGLQNHLKRLRCRGAPSADDNVFNSCGRSFKSYSGMRQHMRKSHPVEYNEELENRYETPDAPPVLDDLDLINMAKAEVNFNGKFINQYLHTIFPNMSIDSIKYRRKTQKYKEYISSLRAEHNIEAREDILEQLEDERLRPQQQAEGEVVEISILESPTGRGRDSLNPNAEVFVPLAAEHRHKISVFLNNYWHSKDEWTSQELALYTYTQLTDYERHKSEVSKKVNEYIAALFTNSARTGKQKTKASTEHKAPVFHSKNHERAYQYKVVQRRYRSNQAALARDIIDGKPLWGSDVYPSISSVQADYKGIFERLSPLDNEPISDRKTEHALDQPITESEVLWAIKTSKSNAAGPDSVTLSDIRKAPIQKLVLLYNVIFLFGVTPEVLRENRTTLIPKGGDRREVKNWRPITISSIIVRVLHRVLSTRFASLPIHDNQRGFMKIDGVLLNNLTLQTLIKERRHRLKPYNILSLDLTKAFDTVSQWSILRALNRFGIDETTKRYVMGSYEKSFTTISAGNKRTRRINIDRGVKQGDPLSPYLFNLVVDELICELENGGDGITVSNDIKVSVLGYADDLILLAESARGGSRQLKTVTEFFAKRGMSINPSKSVAITVNVNRGNKHSYAITRPLFAANGQSIRQLPPGQLFKYLGGRYDVMGQTAPTISDLKEQLSRIDKAGLLPAQKLNIVRTYLLPRYIHHLQSAIVTLKILKSADKIVRISVRRFLGLNRTCADAFLHAPIREGGLGVTNLALQVPAIMRRRITNLISRANITTAAVLSLPYSERLYNKILRWTHNNGGSSSIIARQMAERLEEGYSGNGLRQGNVSTESESWVNNPPPYWSGTDFKKAVQLRGNLLPTKSIPSNPLAERRCRMGCNRNETLCHVLQGCPVSHWRKIKRHDQLVTHTRKIAEKKGWIVELEPRIRCSDGALRKPDLVLQMGDRVVVCDVTVSWEEPDPLSVAAANKVALYSEPRFLSVMASRYPGKNIVVTPLVMGARGTWCAENNQISNILSLSKQDIRSYITKTIIGSISIHRYFMSQT

SEQ ID NO: 33078 - protein, 919 aa, Ampulex compressa
MNQALLPFFPNRTIEGIKGQRRKQVHKDMVSRLVRELAQSDTADNVLPPTNEQREGSLVMKIRDEISKLPPLEGEKYCVEQLNRIYEHLCSWSDEALLAEVSAYIRSVFPAYAEKRGTYTGKRQPKALSRRQQRRAEYSQTQRAWKRNPCRCLRTLLKDIGTSSAPGQQVMVPYWSAVMSSGDRSSPGVGKASETIDALWKPVEPVEIKKALPEFTTSPGPDRVTARQLRAMPSVILARVLNIFLVCGKMPEWLLESRTTLIPKKENAAEPCDFRPITVSSVITRTFHKVLANRLSGAISLDPRQRAFVPVDGCAENTFILDMVIRHHRQSFKPLYLASVDIAKAFDTVTHETIIDTLKTKGVPDPMVSYIAYVYETSQTRLACDGWISPKLHPKRGVKQGDPLSPMLFNLVVDRMLRQIPDEIGVDVAGERYNAMAFADDLVIMATTPKGLQLTIDVCTEYLTQCGLMINANKSFTVAIRNVPHAKKSVVDPNSTFQCAGRTMPAMKRESEWRYLGIPFTPEGRTLSKPEEQVREAIRKLTRAPLKPQQRMFALRIMVLPSLYHVLSLGSTNLSRLKKIDTLVRGAVRKWLALPPDVTNAYFHAKTNDGGLSIPSMRWLMPLKRKARLTRIANTRLDPRSFLAQEIQKSTRRLRSGREELDSVEEIDKRWARLLHESIDGEALKDSNKTPQQNQWITDGTKFLTGRDYVNCIKLRINALPTKSRMNRGRHGDRMCRAGCNAIETLNHILQKCHRTHGARIARHNAVTSYIHRKLQNKYDEVEEEPHLQTGEGLRKPDLVARTGTTVLVVDAQVVSEQSDLKLAHERKRDYYRTSAHKAILERYPTATEVKYTSATLSWRGVWSADSAKELLQLRILKSSELKILSTRALVGGLNGYRIFNRTTDVRRWRRGAPRTGVG

SEQ ID NO: 33079 - protein, 920 aa, Paramacrobiotus metropolitanus
MPPQSFSCSGCGKELRGWGNHKNACPKNLSSTLEQIPIAPPTSFSQPADSPPLSSPQIIIDLLKDARKKGKINKGIPRAARAQAAETFARAVEQCVKEPTVAHWTSLLLFASQCFATEGEVSSKKKESLTGRFRRQLRDFESGVRSPPSSTPTSRIRGGSRSTNDAEHLRRMVESCINECSVHKAVARLASEESVLNIDAKVLPVLRSKHPDAPLDTHFPSPSANDIPAFPPVTAAEVISAVFSFPSGSAGGLDGLRPQHLKDMLSCKDAVESPLCIALCKLINFLVAGKLPEVLRPVLFGANLIALSKKDGGVRPIAVGNVLRRLAAKIVTKRCGKKANELFTPTQVGCGTRGGAEAAVHAVRSFIHEEHDGLRVLFKIDYRNAFNTVRRDIMLQSVLEHFPEYYPFVLSAYGAPSVLSCCGSDEDLSSATGIQQGDPMGPLLYCLVSLLLCISLLSKLRVFFLDDGALGGTVDEVADDLTAIVAASSAAGLQLNPAKCEMLLIGGSAEEREVAKNRLHSIAPGAIVLQPEMVTFLGAPLTDEAIIHSLQQKIASLKLFAERLKLLNAHHGFYLLRNCLSIPKLMYTLRCSPCWKVPELLDDFDRHVKVTLEEITNTKLDGPVYTQAMLPVAKGGLGVRRAKALAPSAFLASVFSTSQLTLQIYNGNSEKLVNDACECWKQESACDELPLNLARVHQCVWDNAVIQKNVDALWKNVGNEKRVEARLRAVSTKYAGAWLNALPAKVFGNFLDDQTFRISVGLWLGAKIVEPHSCVRCGKDVTENGYHGLACQKGVGRRERHNGINDIVLRTLCNAGIESYPEPVGFLRENGKRPDGATRWKWYRGQPLVWDVTCRDTMADSYIDATSKCAGAAAELAFTVKMGKYKSITDRCYFVPITCETFGTYSDDSIVLLKESLFRI

SEQ ID NO: 33080 - protein, 965 aa, Paramacrobiotus metropolitanus
MPSQPFTCSGCGKELRGWGNHKNACPKTLSSTLEHVPIASTGPSSSQSAGVPSQSSSETVINLLKKARSTGKINKGIPRAARALAAETFARAIEQCVKEPTIVNWTSLLLFASQCFATDGEVSSKKKETLTGRFRRQLLDFESGVRSSPCSTPASRTRGGNQSTDDAEHLRRMVESYINECSVHKAVARLASEESVLKIDAQVLSVLHSKHPDAPIDTVFPSPSAIDIPAFTPVTTAEVISAVFSFPSGSAGGLDGLRPQHIKDMLSCKDAVESPLRIALCKLVNFIVAGKLPEELRPALFGANLTALSKKDGGVRPIAVGNVLRRLAAKIVAKRCGKKAMELFTPVQVGCGTRGGAEGAVHAVRSFISEGIVGLRVLFKIDFRNAFNTVRRDVMLQSVLEHFPEYYPFVLSAYGASSVLSCSGSDENVASATGIQQGDPLGPLLFCLVPLLFCISLSSKLRVFFLDDGALGGTVEEVADDLTAIIAASSAAGLQLNPAKCEMLLIGGSAAEREVAKNRLHSIAPGAIVLQPETVTFLGAPLTNEAMKHSLQQKTASLKIFTERLKLLNAHHGFYLLRNCLSIPKLMYTLRCSPCWKAPELLDDFDRHVKDALEEITNTKLDGLVYTQAMLPVAKGGLGVRRAKALAPSAFLASMHSTRQLTFRIFNGNSEQLVNDACENWKLESECEELPLDLARVHQFVWDNAVIQKDVDVLWNNVGDDKRAEARLRAVSTKYAGAWLNALPAKVFGNFLDDQTFRISVGLWLGAKIVEQHSCARCGKEVAENGYHGLACKKCIGRRERHNGINDIILRALCNAGIESYPEPIDFLRENGKRPDGATRWKWYRGQPLVWDVTCRDTMADSYIDAPSKCAGAAAELACREKIGKYKSLTDRCNFVAFACETFGTWCETGIVTLKEIGKKLFLRTGESRSTCFLFQRLSLEIMRGNAMSVLCTVPSHVNWDKFFI

SEQ ID NO: 33081 - protein, 957 aa, Amphibalanus amphitrite
MKLMKSDQDFPRCAACRSLSVRKAAIICGGCGARWHTSCARLTVAQARDLSIWHCRVCLKSGSFTSTKDQSEGNIQKDSKETETTDRNQQIGDIPTKLAQLRESTKIVRLIPKAARAVVANSLSDRINAAVSSTSLDTWWRLFSFAFTALRSPDTNKRNCSLTTLIKRQATEEISSTQRVEADNGSTLYHNSNEKTAQTRQAHHTKDEDIARRVYAKCADGDVGAALRTLTSNEPLAEPTDEVISLLRLKHPPAPEDECIPPPPSSTDAPPMTVTESQVRQSVLSMPTGSSAGLDGIRPLHLRQLISAEAGEAGQRMLTSLTALTNLVLAGRLPSCARDALYSASLCAFRKKDGGLRPIAVGSVYRRLPARIAARFAADILGPELRPVQLGVGTPLGCEAAVHAARNFAKRSASQTETTRVLIKVDVKNAFNTVRRDVVLQCLKDNCPEVYAMAYQAYSTPTPLLIAGHTIMSSTGVQQGDPLGPLAFALAVNTCARSLKSPLNIWYLDDATIGGPVADVISDLQTVTKMLPEVGLHLNPAKCEVNILNDMREDQQKRAIYEVKRTVPEISETSVRSIQLLGSPLHEDGLSNAAKNVADMISKLCERIRLLDRHTGLFFLAHHVSAPRVTYLLRSSPLYIESAGLGKIDEIVRSTLADVTNVDISDSTWIQASLPLRHGGIGIRSVESLALPCYLASLHAAASLMATISPMDVSIPTLSIVEPATNEFKKLLSLDDVPEKHEKHLQRAWDDLACKTVRERLIDSANQVDRARLLAACKPHTAAWLQAMPAANLGLHLDAETVRVAVALRLRAPICKPHNCSQCSRPVDSQGHHGLSCKKSAGRLPRHANLNDVVRRALTSAGMPSILEPQGLDRGDGKRPDGVTLFPYRQGKSLVWDATCVDTFADSAVAKAALEPGSPAAAAEARKRTKYADIAERHIFVPVAVETTGVLRPAATA

SEQ ID NO: 33082 - protein, 1464 aa, Oedothorax gibbosus
MAEFNYPFDDVLLCRQAFERLNRQLGVQCSREFTDPDPTKLIKKVRGHRTKVHPSYPKSETFTCRRCQESFRGDGSFRDVRRHDLTCPRSPRPQLFGAGPSADADDASSVTSGLPLDPSQSTSPAPLLPQTTGWSPADAGPAAGPQGTIPHPIDQASDVTAAGSLSLSLPPPDDQPLDLSAGSPRSLPPSDALLISGTPSPLLPPLPAAPPLPPGAGTPQFSPYSGLRRESPLPDWALPLVLPSTSGSTTLWAPTAAVHDADSIRVPPAASDSPPDLLSHPILLERRVSQLLDGEYHVVTSPRRTDDRLGYLCQCGILYPAVVDVLACCTGDHRSPPASRSLQHDLPIPDAGGPALRSSMPPPLARNIFDELSEAIANGESADLLPTGDLSCLTCPQSDAAPALRVAPCPSPGHPLAASPQLLIPTASASSLRSTVDPGASDPGPSTPHLGFIQRTAQPSPLLTLASGPTDAVLPPTRPDLNATFIIELPSDLERPDIVRATATIPPLPPDPLDPRLSYLEGYKLSAFQRFWTLRFADVDDPEELDKATQEFSEALLCPPKRRRTGRRSGGRRPTRNTRYRKDLDVDGITNPRDFKPFFNDFGLPFSREEACNLQQDFYSRPGKTMGEIISGSPELCDLPGDDLVKYFTDIYAPKTYDPQFQFASFPVPDPASQEALVRPFDPAEVWAKLKKAPKTAPGPDLVPFSTLKSRDPNGLILCVLFRRILQFGGVPDAFRKANIVLAFKAGERSDISNWRPIALLNTVGKIFSSCFATRLNSWSELNARTSPYQKGFKESDGCLDHNFVVKQLIARARNSGSSLFLAWMDLENAFGAIPHDLIFDGLRRAGLPDLCIGLIRSLYTNARCKIRTTAGLTEAIPMQAGVRQGCPLSAILFNLTIEHLLRTIEDSGLPGVQLCGRQVKILAYADDLLLVAPDAATLQKGLTRLEKAAALASFRFKPRKCATLSISKRHPAGLAFYIYGQSLPLLSNDAAYKYLGVKVGFSAKQDYTATIKEVRSAILEVQNSLLAPWQMLAAIKCHILPRLDHLLRNLALQKQDISELDSVIRQVGKSILNLPQRGDPNSVYIPTAKGGAGLPSISDLVDIHAVNYAFKVLSSSDSFVRELATSTLKVQVQSKVHRPPDLTDMAAYLTGTLQIDTKAAGTATIWSLARSAAIRLRKKFDLAWSWCQATAQFCLSLGLDEKQVIIPQSVAPRLFHFLCDFTGLSYVKTLSQKVEQGRSCPLISKHASSNDFIRTGEGIRFCDWRFIHRARTGILSLNCIRRHRGGNTRCRKCGYANESPAHVINHCHSHSVASNKRHNDIQDRLIRAIPGSKEVLSVNRSLKDIDSSLRPDILIKNADGSLILIDVTCPFEDGEDAFDKARARKISKYQPLIDALAARGTPATVEAFVVGSLGGWDAGNERVLRALDISLKYSKLMRKIMCTSCIKWSRDIYVEHLTDTRQF

SEQ ID NO: 33083 - protein, 931 aa, Cardiocondyla obscurior
MTMMARKEAQLTVENQTRFLNQELVRFFPNRSGEAIKGKRRQQEYKNMVQEYIEQLRNQGPISEEEEDRMDDNEMEDRFLTYLESLREPRTSDFQGKKLHKIAMEARSKGKEATKHEVALYLREIFPRPPRQKGKKTEQTPPNAESRRIKRRKEYGWTQTMWRKDRKRCITNILEKTNNESQPAREVMEPFWKNIMTTDGQTAPHKIKVPIKTNIWEPIGREDMKIAKIPLTTAPGPDGVTARQYRSIPTEIILRLYNLIMWCEAPPADMLLSRTIFLPKKQDAKQPGEFRPITIPPILLRGLHKILAKRMEKELNIDLRQRAFRSTDGCADNIHLLDTLLRYHRKEYKSIYVASIDVSKAFDSITHTAIESTLTNMGVPAAMLRYLARTYAESKTQLEGKGWTSRPIHPKRGVRQGDPLSPIIFNAVTHWLLQSLPQEIGSNLGDTRINAAAFADDLLLFASTAAGLQKLIDTTTTYLEDCGMMVNVEKSTTIAIKATPHRKKTAVDVTTTFTCNNRQLRALSRTDEWRYLGIIFTAEGRTQCHPTRTIKPYLDTLTTAPLKPQQRMYALRTTVIPKLYYQLALGTVTIGSLNKADKIVRAAIRKWLVLPHDVPVAYFHTSIKDGGLGVPAMRWTAPLSRRGRLLAVLRNTNHQGLTKYVEEEIKICEKRLTDHGIKYNTPEMLANRWAKQLYSSIDGAAMKESAKTPHQHQWVADGTRLLTGKDYIQCGRVRIGALPTKSRTSRGRHQDRRCRGGCQAQETLNHVLQHCHRTHNARIQRHNAIVKYLARNIYKGGYRVYNEPRYNTELGLRKPDLVAVLGETAVVIDAQVVSEQTKLPEAHKRKAEYYNTPEIIRKIKETHGVRNVITTSATLSWRGIWNPDSAKELQNLGYIKKQELKILSTRVLIGNVAAFRIFNATTSVEFRRGIG

SEQ ID NO: 33084 - protein, 931 aa, Tetramorium simillimum
MLARKEAQLTIETRPRFMNQELQQFFPQRTIEAIKGKRRNQEYKEMVQEYIEELMNPDSATPPDSEQEDEELENSDTVFLDLLEALREPRNDDFQGKKLHKIAMEARTSGKETTLQKVSLYLREVLPPPQRHRNKRSNPTPPAPKNKREARRREYGWTQNLWTKNKNRCINNILEQMGNVNHPPREIMEQYWTNLMSTRGNETPQHESATIKEGIWKPIEGVDLKLARIPYTSAPGPDGTTARLYRAIPASIILRLYNLFMWCEALPTDMMLSRTVFLPKKKDAKEPGDFRPITIPPILLRGLHKILAKRMEAALNIDVRQRAFRSTDGCADNTLLLDTILRYHRKEYKSLYMASIDVSKAFDAITHPAIRNTLESLGIPQPMVRYLSGVYAGCRTRLEGNGWSSRPFHPTRGVRQGDPMSPVVFNAVTHRLLQRLPKDIGTDLGDGKINAAAFADDLLLFATTPAGLQELINTTSGFLGECGMTVNTNKSMTVTIKASAHVKKTAVDGATTFTCNGQRLPALTRSNEWRYLGVMFTAEGRSKYQPAQIVVPLLDALTTAPLKPQQRMYALRVMVIPKLYHQLALGSVKLGSLNKTDKLIRAAIRKWLALPHDVPVPYFHATTKDGGLGIPSMRWTAPVSRRGRLLGVLRNTNHPGLVRFIEKELRECERRLTDHGVCHNNPEMIADRWAQRLYKSVDGAGLKESRNTPHQHQWIADGSRLLTGKDYINCGRARIGALPTRSRTTRGRHQDRRCRGGCLAQETLNHVLQQCHRTHESRIKRHNAIVEYVARKMPKSGYKVFQEPRYKTAIGIRKPDLVAVLGETAVVVDAQVVGEQTALAEAHDRKVRYYQEPAVVEKIREVHNVRTVIVTSATLSWRGIWSADSARELMNLGYLKTSELKIIATRTLIGNIAAFKKFNATTSVEFRRGVG

SEQ ID NO: 33085 - protein, 925 aa, Monomorium pharaonis
MLARKEAQLTTNEQPRFMNQELQRCFPQRSIEAIKGKRRGKDYKEMVKRFIEELENPIPSDPELIEEETGEEFLTFLNTLRAPADNEGFQGKKLHKIAVEARATGKEGTLQKLALYLKEVFPPPPRQNRRKRTAPAAPRNKREARRREYGWTQTLWKKDRRRCVSNILNQMDNAPQPPREIMEPFWSNLMTTKGEEAPPRERSPILGGIWEPIKKEDIKLTRMSRSSAPGPDGVSARLFRSIPTGILLRLYNLIMWCEALPTSLLLSRTIFLPKKKDASEPGDFRPITIPPVILRGLHKVLAKRMEGALNIDMRQRAFRSTDGCADNTMLLDTLLRYHRREFKAIYIASIDVSKAFDAVTHPAIERTLESLGIPPPMLHYLSGVYAGSRTRLEGNEWTSRSLHPTRGVRQGDPLSPVIFNAVTHRLLQRLPGEIGVNLGESKVNAAAFADDLLLFAATPPGLQELINTTAEYLGECGMKINADKSMTVSIIASGHNKKTAVDPTSTFTVNGRRLPALSRSMEWRYLGVTFTPEGRTKCHPAKVVKPYIDALTKAPLKPQQRLFALRTLIIPKLYHQLALGSVKLGALNKTDKIIRAATRRWLALPHDIPTAYFHTAVRNGGLGIPSMRWTAPISRRGRLLAVLANSTHQGLKKFIETELRECERRLTDHRVLHNTTDMIADRWAKKLYDSVDGAAFKESKETPHQHQWVADGSRLLSGKDFINCGRVRINALPTRSRTTRGRHEDRKCRAGCLTQETLNHVLQSCHRTHEARIKRHDAVVKYIARKLPHGGYRVCEEPRYNTTVGLRKPDLVAILGETAVVIDAQVVSEQTNLADAHRRKMRYYGEEAVVNKIKEVEGVRTVVTTSATLSWRGIWSSDSAKDLIKLGYLKTSDLKIVATRVLIGNIAAFNKFNATTSVGFRRGIG

SEQ ID NO: 33086 - protein, 924 aa, Tigriopus japonicus
MNQELHSIFPSRTLESIKSKRKQASYKLVLEKLREEEEETLMESTTDEDETVSLPVDSDSEENLPWKVSLQVAIVQACPELAEGENDIVPMELLATKFQMFLYGRRVEVVKRKKPVKEKRGTQRSPTNRYHRRRMEMGKLRSQYDRNPERTGKNIINDTTSDEITTVDPNANFEFWSNLFSTHSLKDEREALPLNSVQWDLLAPLTGEEVREVRKKMKSGAAGPDGLKMEALRALDSRVLSAYFNAFLYHQRLPEFLKEGRTTLIPKVKQPSMPGDFRPITLSSVALRLFHAVIGKRFAGVPLTPRQKGFRDLDGCGENVWLLKSLIDLHIKKLKPLNLAFCDVRKAFDSVSHDSMLRACKSVGIPPPLVEYLRNAHEGLTTVLEADPLSRKIECNVGVRQGDPLSCHIFNYVMATAIAEIDPCVGVKVGDGELLSYGMLADDTFLVAETPGGLNRTFGQFELALGRCGMRLNPKKCKTLQIGVWQAKKKWFVARTPILKATDGCMVDAITISECYRYLGVELGARGVETPSDDKLVVQLARLKASLLKPQQKLHILRTVVLPAYYYPLTLANYSPRKWKETDKLVRKFVREVLHLPHDTPMGFFHASHKSGGLGIPCIFTMVNRLRKNRISNLFKSNDPVLQYLTTAETYVMKELAKHSKPIVISGVEFLLSKQGCETAWAQVLHQSVDGKGLAHHSPGNEYKSFWTIDKHSRLSGREYISAIHVRGSLLSTRSRASRGRPGLIKNCKTCRDRVENLGHTLQVCPRSHGARIKRHNELVKGIRVAAEKKGFRAFIEPRIAVGNTFAKPDIILIDKGRCCVIDPMVMADCGSLDNANAMKVAKYKIIEVEKYVTNLHTSLFEGEGSPKITWSGAVMDWRGCWANSSARFLKTILGIPPGTLEYLSIRCLLASRAIWHQQQCRAD

SEQ ID NO: 33087 - protein, 1056 aa, Tigriopus californicus
MKLKASSRSPPVVRGRDEVVRTLPQPVMDSGVQTATSAETGEKTTPSRTEGLTRMLACPECGRSFKGKGGLGVHRRRMHPEAYHAQVEDDKAAAIVNKRWTDEEVRLLASAELRLSAADGIMAINRQLTSIFPNRTLEAIKGKRRQAGYLAILSEMREKEGEDLQEEHSTEGEAVDEPVEPVSENQWECAFSSAITQAHPGLGNEEGAILPMEQIDHLFQTFLYGKVLDVQTRSAPRGGGSNEGNRAPPTRKKDRRIPPNRYHRRRMEIGKLRSQYDRNPERTGKNVINGTVLDAPPEIDPNAQFEFWKGIFSKPSIKDTRPPLNINPIQWDLMSPLKVEEVVATRKGMKNGAPGGDGMKVTQLRALNAGHLTAFFNTFLLHQRLPDFLKVGRTTLIPKVKDASTPGDFRPITLSSVVLRLFHGVIAKRLAKIPLTPRQKGFRALDGCGENVWLLKILLSKRIKELKPLNLAFCDVRKAFDTVSHESMLRACRSVGIPPPLVNYLKMAHQGLTTVLVSDPNSRSMDCTVGVRQGDPVSCHIFNFVMAAAVAEIDNAVGVSVGDAGLLNYGMLADDTFLVAETPRGLKRTFGQFERQLELCGMSLNPSKCKTLQIASWKAKKKWFVARNPIVTASNGTMVETMTISDTYRYLGVEMGARGTQAPSNIEISKQLANLKACLLKPHQKLHILRAIVLPSQYYKSTLAEYKPRSWKATDKLVRKFVREVLHLPHDTPLGFYHASHKMGGLGIPSLFTTVNRLRKARIENLCSSSDPVMTYLTNNDSLIPKELANHSKTVAVNGVEFLMTKKGIEAGWAKVLHNSVDGKGLAHHSPSNQYKSFWVIDRQSKLSGREYISAIHVRGSLLSTRSRASRGRSSLPKHCKQCFDRVGNLAHTLQVCPRTHGVRIKRHNELAKGIKSAAIRKGFQVVEEPRIRVGKSFVKPDLILVKKGICCVVDPMIMADNGDLDKADLDKASKYQIIEVERFATNLHNSLFPSKDTPKLLTSGAVMDWRGCWSCRSATFLKKIIGIPPKILEYMSVRSLLSSRMIWSTEQCRAD

SEQ ID NO: 33088 - protein, 926 aa, Tigriopus californicus
MTINRALHNQFPNRTIEAIKGKRRQVGYKSILAEERKRAGDALIDHAEKVEDAELLPVTSRAESVASWKDSFRSAILQALPELGDEEGEIRPMTELEHQFQMFLYGKRVEDVKGKKRVVEKKGCQRTPPNRYHRRRMAMGQVRSQYDRNPERTGKNIINDTRMDESPTVTPDAQFDFWGGLFSSSSVRDTRDPIRLNSVQWGLIAPLTEQEVKDTRRRMKSGAAGPDRLRIDQLRALDSKALTAYFNGCLFHQRQPKFLKAGRTTLIPKVKNPTSPGDYRPITLSSVALRLFHAAIARRMTAVPLTPRQKGFRDLDGCGENVWLLKNLINLRIRTLKPLNLAFCDVRKAFDSVSHESMLRACVSVGIPPPLVEYLKDAHSGLTTVLESDPKERKISCNVGVRQGDPLSCHIFNYVMAAAIAEIDKSVGVKLGGGDLLNYGMLADDTFLVAETPGGLSRTFGQFERSLRLCGMLLNPSKCKTLQIGVWQAKKKWFVARKPILTSDTGSMVEAITVSECYRYLGVELGARGVETPGNEKLDLQLARLKVCLLKPQQKLHILRTVIIPSLYYPLTLAEFAPKRWISTDRLIRKFVRGVLHLPHDTPLGFFHASNKFGGLSIPSLYTMVTRLRRNRLSKLIESKDPVITFLCGNDSFIPKELANHVKPVTIHGVEFPMSKIGCEKAWAQVLHSSVDGKGLAHHSPDKLYKSFWVIDKRSQLSGREYISAIHVRGALLSTPSRAARGRPSAKKTCKTCLDRVCNLGHTLQVCPRSHGARIKRHNELVKGIKKAAERKGFKVFDEPRIPYGKSFLKPDLVIVSKEKCCVIDPMIMADCGSLENGNLNKINKYQVIEVENFTINLHKSLHPSQGKPRLHWSGAVLDWRGCWACSSAKFLKTIVGIPSSSLEYMSVRSLLASRAMWHQQQCRAD

SEQ ID NO: 33089 - protein, 1209 aa, Athalia rosae
MPRTIGPQMRTYAQHIEGESWTESGTRTTVHRILMSEHSNAHAISGDGCDDPPGPDRVPHLSTLLSPGRGQHSRDSEATRHKRGSGTSSARSTLLQGALAGNNSNTNIEKRVQRGVSIPLCSEHSLLNFSTLLSPNTTNNNIPTTTTNPTAPTATTRDEVARTTNYGNSNPIITQYPLSNNHHMEPREEDGGMHDQNSTRDGNEPIQQHTCAICRRGFSSLTGLGVHKKRKHPRETNEATDLTRKKPRWRDEDMRRMAMMEAQAPASVHCRNEHLVENVRLSPPRTIEAIKGLRRKAKYRTIVQEYKRNQASGRRGNQHDIVEGHVEAGRNDVEETSTDDRSRDSGTGRPNATRSTRGWLQEKCQLLESEQCTALGKKELCAAIRASLQGHNPTGELMEWFNAQFPDLGRRKTRKERVRKERTEQSRRARRRAEYAEYQTLWKKNTAKAAKKILDGDVDIDRHPSLAEQEAFWRPIFEAKGHERPTEGDTNADGALKQIIEPITAQEVGKHKPNRRSAAGPDRLGAKRWLNGPTDEIKAIVMNIIMESGEIPRAWRDSRTILIPKEKGTMDPAKFRPLSISSIVLRHLHKILAKRLLNLPLLDQRQRGFIQADGVAENICVLAAALDDANCKTKQIHAVMIDVKKAFDTVSHKSIVQVLARKGIPERMVTYIERLYEQAETVLEVDGAFSKPIKPGQGVRQGDPLSSFIFNLVKDEVIRSIPETVGYQMDGCNINGLAFADDLVIIGSTKEGVQEALDGVVETMALHGLSPMPTKCAAVSCIPSGRDKKIKVISMPTLKIEGTYIPQLGIEDSWKHLGVMFDRKGPRAPTTGLEDLLERVNKAPLKPQQRMKILRTFLIPRLLHKLVLGRTTYDALKRMDKIIRKHVRKWLVLPHDITKAFLHAPIAGGGLGIMCLETAIPQMLERRIMNLTNSSFTAAVAASRSKWAVNKLKWCQMRKGANEEWTRKLYGSTDGWEPREAGASRHSTSWVDDWRVRIPAKDWIQYIRTRINALPSAMRTTRGEQRRRQNHRCRAGCQALETTAHIIQQCHRTHGGRILRHDAIAETVAHQLNERDFTVQREMIYATETGNRKPDIIAVKQDQALILDVQVVSGQRDLTIAHNNKRKYYEENHDLMDKVARAWSVSRERIKVSTITISWRGIWARETHAILTELGLTNMQHQGLTTRVLQGSHTNFNRFGRMTTANTHV

SEQ ID NO: 33090 - protein, 1015 aa, Ceratitis capitata
MSTVEIDEIISQNTGVLSTEPENEILKKLKIEFQRAMLEFSGTDPTLLPIIPKQKATKSIAIAISILNNDILPAILSERVSTFEELQTAIYAAATTITRYTGGKLFPKAKGKPEKSEPPWKHRLKAQIQKLRAELGRVTQYIHGNRSKNILNWYKSLKKKYKILSKQDPPNKYAEELLDTLRQKLAIKCNRLRRYTLSDKRKTANAAFQKNERSFYMKLKDNKTTDTAEIPTSAQIEQFWKPIWSSSVTHNTSAAWISEECKRRENINTMENITLHELNIKQAVENTHNWKAPGRDGIHNFWLKKLTSAHALIADHFSAFLRNEAQVPTFMMKGKTHLLPKDLKNTSDPSKYRPITCLCTLYKLLTSCIATKIYEHIKHHNIVATEQKGCIKNSKGCKEQLIIDSVAMEQAFHNQRNIYTANIDYTKAFDSIPHSWLLKALEIYKISPNIRQLLCKTMSSWKVTLNLSHKNGLIKTASTPIKRGILQGDALSPLWFCLALNPLSSILNETNNGFNIKGSLSYQHKLSHLLYIDDIKLYASSERQLKTLLELTEDFSNDINMSFGIQKCRRLSVVSGKIVLRDFELSNNERISAMSENDTYKYFGFTQAKRMHHSKIVCATEEYIERVKSLLKSHLNGFNLFKAINTIAVPVLTYTFGTTKWSDADLESVKSTTRTLLTKFGIHHPKSAVERVYLPRRQGDITHLHRKCVHSLRLYFHNQLHKVVCQSDLKYTPLNLNDTSTSDIPTDAQHFQSLLLQWKMKSIHGKYPYAIDQPEIDTKASNDWLCRPGIFSETEGFMCAIQDQVIATKNYKKYVIRAAIENDLCRRCQKQPETINHITGACAPLAATEYLTRHNHVAKIVHQCLALRYGLIAEERPYFKYTSQAVLESSLTKIYWDRSILTDHPTAHNRPDILLIEKREKRALLIDIGVPNTHNLQECYTEKCKKYHSLAYKIKDMWSLQNVVIIPIIISSTGVIPKTLNKSLDKLKLMEKRHAIQKAVILSTTTIVRKFLNLN

SEQ ID NO: 33091 - protein, 1404 aa, Haemonchus contortus
MTLPVWIIPAGCQSQITLVQCRGAKSHVYDMYTGQGVVSSRAVKRTVKALQAAYAKLAKRTERAESIAASEGPAELRTSSRNSSLQQGSEITVFESQQDEGEENPGHQVLGEVASLQYNIESSEGTAEIENQSPEGNSQESPLDGTREPQPNDDPVAMESRTRSRRRTRRTSRRRRDAVELVHPSSDDVLLTQNSTEALEIQQEGDAVVPTPPQQSLQSRRSPVRENGDDPQNRRVQRTKDVIWTTNELAKLAFMVERHRDPDGRIRWADLRSTWDCSRMKNDPRRTLSALKAAYAKIARLTDRNEAPRSEASNNEHEDEEQPAESNIGEPVTLVDQEHTSLSDDSESGNSTETLEQRLRERFNRYHRMAIDSKDRQPIRRPREEIPDGILQLGNQILREKLGRRNSTNKRTLTALNAAVYAIGRAITSVLLDDAAEKAGKKYQKLREAKALRDSLIRTISIVSHELQRRSKGNRGAPTKQYLEIAKLHRVTTTAQVQRLLIRFKDELKIVTSDVETKQQALRRLRERQRGYPAVAREPREKESDVPVAEVREHWKAIIGETQPFHPSDDLNEWAREQQTDSRDVGDLSDETWAKIFSKIKPWKATGPDVIQGFWWKKLPEAKERLKAWCLEALRKPHRIIPNWVCRGKIVLIPKGNSEARGPGDFRPIACLNTCYKVLTAMIAQQILQSAGDVLPREQVALRKGVWGCTHAHILDQTICKDALRRKNTLHTLWVDMTKAFDSVSHGAIKWILKRAGVPSLTRRLLSVILTKQSVRYCGYQNGKLVKSEPLEVKRGVMQGDTLSPLLFCMAIAPISTWLRNNVSPYRTSTGALTLACEPLTINHIFYMDDLKVYSPSWDDIVKAKEGIQKVAGELGLRLNPSKCAVNSLNQPRPNEMTPSMDDIPVLGSNSLYKYLGAEQTSLISWDQLWSRVRTNAMATARRIMLSDLAVRQKVNGYNLIVIPKLKYAISCIIYGNGRFCTMRKQAREFDEAIRKLLAETHMRFGHSCVARLYVNKEQGGLGLKSAEEEMEHTIVYTWCYLASHPDFQVPYHLCESLKSSNKRSLISDFLSVIAENRLENEITRPAQSSICVRNKIYVTATSAARAISTLVHERWANTRMHEWLQRQVASRVLSSNENTGLPYVCHKDSFLWSQTGWVSSTVLRNAWAAQEGSLPTKGSASGQSIWPNGDQLCRMRCPAKETAEHIVSACSHWRTNLMLERHDDVARVIYHSLKKKYNMSSRVTNTHEPHVVEEDQVLIHWNDRILTSESLRHDRPDILVKDLKERVKWIIEISVSWFTRISQQEKKKVQKYALNSCLPEDTDPEDFYSGPNLKAALQAQHRMRVEIVPIVIGTSGECSPDLRRYVRLLKLPDGDKAIIERMQKCAVLGTNRIIKCHMSNSDM

SEQ ID NO: 33092 - protein, 1105 aa, Centruroides sculpturatus
MSKLKSMKAHQLKDNACRASIEASTPPAPVPENRRIRRFRTRPRQRRDRRATSTPPANDDPSSQSANSPSSSEGDWTPVTRRRSNRRRSNGVQQRRATRPAPTSSPTSAGPPVAPDPIPPPSGTTPPVAHHTASPPPPTPNLTTSNSQRTIAQSPRLQHPPSFHQIPQTSDLPILLGTRPSPCADPSMEHPQPPSQSSSAVPSWACAWRDRFDVALDPDMLEVMVDDFVALAQQICDVRVFEPSNNNRHQPVSATDPSRIQRLYRINRKRAMTIITEGQPTYCNIDRDQLYQHFRSVYAASSQQQGPRPSSFPTALHHDFNDPLSAPFTPSEIQTRFKRCHNTAPGPDGLRYHHWSRIDPHGVMLCSLFNAVQRTSHTPRWWRCSNTILLYKDGDKQDVNNWRPIALSCTLGKIYSACLASRLLSWCLDNHIFSNSQKGFLPYEGCLEHNFLLQATIKDARRRRSECHIAWLDIANAFGSVPHHTIIQCLEWCGLSEDSITSISNLLANCSTRVRASDGYTDSIPILSGVKQGCPLSPLIFNIVIETAIRHVRSLKEGYTLMGEEVGIIAYADDLALVSATKDGLQRQLDAITEWADWAGLRFKPRKCATLSIIGARHTSDNNITFSLQGSQLPSLRPDETYKHFGVPTGFTTNPTDSNIFQKITDDITRLDHSKLAPWQKIDATNTILLPRLSFHLLVGSNPKQPLHKLDRHIIKHAKKWLNLPQRASSEIVNIEHDYGGANISSCYTLAAISQVTQAMHLFTSKDPTICSLALNFLKDVVKKRIYRDPSLEDVCTYLNGSTSDEFGAKSYDISSMWTRLRIATRRLRKTINCEWIPVGDTIAIACEDNLVNRSSCTKILSMKFKAAQLTRLLRKPDQGKAYRCTAKHPASNHFLRSGNYTTFADWRFVHRARLSVVPLHGLRRFGNTSKKCRRCSHPQETLAHVLNHCTRNLHIATKRHDAVLGRLQRAIRPDNLQIYINQQVPGFDSRCRPDLVVICEDAKTATIVDVSIPFENAQEAFTIARQSKVEKYRSLTDHFRSLGYDTVCDAFILGSLGGYDVNNTSIIQRLGISRKYSSTMIKLMVSDTIRWSREIYHHHLQTFH

SEQ ID NO: 33093 - protein, 1159 aa, Centruroides sculpturatus
MPQVALLVPLHPPHNCPLCLPIPREYIDHAGLVRHLRREHATELSFECWVCGLIMPKLKPMKAHQLKDGACRASIEASTPPAPIPENRRIRRFHTRPRQRRDRRATSTPPTNDDPSSQSANSPSPTEGDWTPVTRRRSNRRRSNGAQQRRATRPAPTSSPTSAGPPVAPDPIPPPSGTPPPVAHHTASPPPPTPNLTTRNSQRTIAQSPRLQHPPSFHQIPQTTDLPILLGTRLSPCADPSMEHPQPPSQSSSAVPSWAYAWRDRFDVALDPDMLEVMVDDFVALAQQICDVRVFEPSNNNRHQPVSATDPSRIQRLYRINRKRAMTIITEGQPTYCNIDRDQLYQHFRSVYAASSQQQGPRPSSFPTALHHDFNDPLSAPFTPSEIQTRFKRCHNTAPGPDGLRYHHWSRIDPHGVMLCSLFNAVQRTSHTPRWWRCSNTILLYKDGDKQDVNNWRPIALSCTLGKIYSACLASRLLSWCLDNRIFSNSQKGFLPYEGCLEHNFLLQATIKDARRRRSECHIAWLDIANAFGSVPHHTIIQCLEWCGLSEDSITSISNLLANCSTRVRASDGYTDSIPILSGVKQGCPLSPLIFNIVIETAIRHVRSLKEGYTLMGEEVGIIAYADDLALVSATKDGLQRQLDAITEWADWAGLRFKPRKCATLSIIGARHTSDNNITFSLQGSQLPSLRPDESYKHFGVPTGFATNPTDSNIFQKITDDITRLDHSKLAPWQKIDATNTILLPRLSFHLLVGSNPKQPLHKLDRHIIKHAKKWLNLPQRASSEIVNIEHDYGGANISSCYTLAAISQVTQAMHLFTSKDPTICSLALNFLKDVVKKRIYRDPSLEDVCTYLNGSMSDEFGAKSYDISSMWTRLRIATRRLRKTINCEWIPVGDTIAIACDDHLVTRSSCTKILSMKFKAAQLTRLLRKPDQGKAYRCIAKHPASNHFLRSGNYTTFADWRFVHRARLSVVPLHGLRRFGNTSKKCRRCSHPQETLAHVLNHCTRNLHIATKRHDAVLGRLQRAIRPDNLQIYINQQVPGFDSRCRPDLVVICEDAKTATIVDVSIPFENGQEAFTIARQSKVEKYRSLTDHFRSLGYDTVCDAFILGSLGGYDINNTSIIQRLGISRKYSSTMIKLMVSDTIRWSREIYHHHLQTFH

SEQ ID NO: 33094 - protein, 851 aa, Centruroides sculpturatus
MLEVMIDDLIYLAQQICNIRVYEPSANHHPHPAAANDASKIQKLYRINRKKAMAIVTDGQPTYCEIDRTTLFNHFRSVYAAPTHQHQLSLLTFFPETLQHDFNDPLTAPFTPEEIQLRYRKCHNTAPGPDGLRYHHWSRIDPRGVILCSTFNAVRRTSHIPRWWSLSNTILIHKGGDKNNVSNWRPIALSCTQGKLYSACLASRLLTWCLDRNIFSHSQKGFLPFEGCLEHNFLLQATIKDARRQRKDCHIAWLDIANAFGSVSHHTIIRCLQWCGLHDDSIAIISDLLTGCSTRIRANDGFTEDIPILSGVKQGCPLSPLIFNIVIETAIRCVQNLHQGYTLMDNEVSIIAYADDLALISSSKEGLQQQLDTISSWADWAGLHFKPRKCASLSITDPRRPTDTTPFSVQGSPLPSLRPDEAYLHLGVPTGYATHATNTSIHDRIADDITKLDKSRLAPWQKIDALNSILLPRLSFHLLLGSNLKKPLHKLDRHVVKHVKKWLYLPQRASSEVVNISHDHGGANVPSCYTLAAISQVVQAIHLFNSKDPTICSLAINFLRDVVEKRISREPTLEDLCTYLNGSMDNEFGSKSYDISSMWTRLRIATRRLRKTINCGWTPVGDTIFIFCSDSLLSKNSCSRILSARCKDALLLQLLRKSDQGKAFKSTAAHPASNHFLRSGNYTSFADWRFIHRARLSVVPLHGLRRFGNTSKKCRRCNFPNETLAHVLNHCHQNLHLATKRHDAILGRLRRAIQPGDLQILCNQQVPGFNDRCRPDLVLINDSAKTVTIVDVSMPFENGYEAFSIARQAKVDKYQAVTEHFRRLGHDTVCDAFIVGALGGMTPTTYPSYNA

SEQ ID NO: 33095 - protein, 1154 aa, Centruroides sculpturatus
MSRVTLLVPLQPPHGCPLCLPIPREYIDHAGLVRHLKREHSTELNFECRACGIVMTKLKALKLHQTKAKSCKASIESFSPAPIPENRRIRRFTTRPRHRQVRRATIATAMDTTTSPCSDTSASPPQNNTSPTTSSHNNRRRSGRTQMRRTTNPAPISPEDNAPATVDSRHTASSTPPATPRHHTAQPVVIISPLPNSNWTRSEPFLSRPPSPPTDQPHVPVPEAQPNPGCPPPACAPVELQPPTDQQSTDVPSWALAWRDRFNIALDPDMLEVMTNDLVTMTQEMCAIRVHEPTTNRHQQPITACDASKIQKLYRINRKRAMTIITEGQPTYCEIDKDCLYEHFRSVHSSPTDSQGPCPTLFPQTLQHDNNDPLTTPFTPEEVKARFRRCHNTASGPDGLRYQHWNRLDPHGVILSSVFNAVLRTSHIPQGWQKSNTILIYKGGDKQDVTNWRPIALSCTLGKLYTACLANRLLTWCLDNNIFSHSQKGFLPYEGCLEHNFLLQASIKDARRQRKDCHVAWLDIANAFGSVPHRTNAQCLQWSGLHEKSIEIIMNLLANNSTRIRAQDGYTDDIPILSGVRQGCPLSPLIFNIVVETAIKCVKSLNNGYNLMGEEVSIIAYADDLALISATREGLQQQLDAITEWADWAGLHFKPRKCATLSVIGPRHTTENITFSIQGSTLPSLSPDDTYKHLGVPTGFSTHPTDPDIFNKISEDIPRLDRAKLAPWQKIDALNTILLPRLSFHLLAGSNPKKPLHKLDRHIVKHTKKWMNLPQRASSEIINIPNDFGGANIPSCYTLAAISQVTQAMHLLTSKDPTICLLATSFLKDVVRKRIYRDPSLEDICTYLNGSMNDEFGAKSYDISSIWTRLRIATRRLRKTIDCGWTPVGNTIAMACENNLTNRANCTNVLSTKYKLAQLNCLLRKPDQGKSFKIISGHPASSHFLKSGNYTTFADWRFVHRARLSIVPLHGHRRFGNTSKKCRQCNYPRETLAHMLNHCTRNLHMATKRHDAVLNRLHHAIRPGNFEILTNQQVPGYNDRCRPDLVVISDTAKTATIVDVCIPFENGQDAFDIARRAKEEKYRNVKEYFRRQSYNTTCDAFILGSLGGYDHQNTSVLQRLGISRNYSRTMIKLMVSDTIRWSREIYHHHLQRPN

SEQ ID NO: 33096 - protein, 1156 aa, Centruroides sculpturatus
MPQVALLVPLHPPHNCPICLPIPREYIDHAGLVRHLRREHATELSFECRVCGLIMSKLKAMKAHQQKDGACRASIEASTPPAPIPENRRIRRFYTRPRHRRDRQATTTPPANDDPSPQSTNGSPPSEDDWTPVTRRRRSNRRRSNGAQQHRATRPAPTSSPISAGPPVALDPIPPPSGTPPPVAHHTASPPPHTPKLTTHNSQYTIAQSPRLQHPPPTLQVPQTIDSPILLGTRPSPRTDPSMEHPQPPSQSSSAVPSWALAWRDRFDVALDPDMLEVMVDDFVALAQQICDVRVFEPSNNNRHQPVSATDPSRIQRLYRINRKRAMTIITEGQPTYCNIDRDQLFQHFRSVYAASSQQQGPRPSSFPTALHHDFNDPLSAPFTPSEIQTRFKRCHNTAPGPDGLRYHHWSRIDPHGVMLCSLFNAVQRTCHTPRWWRCSNTILLYKDGDKQDVNNWRPIALSCTLGKIYSACLASRLLSWCLDNHIFSNSQKGFLPYEGCLEHNFLLQATIKDARHRRSECHIAWLDIANAFGSVPHHTIFQCLEWCGLSEDSITCICNLLANCSTRVRASDGYTDDIPILSGVKQGCPLSPLIFNIVIETAIRHVRSLKEGYSLMGEEVGIIAYADDLALVSATREGLQRQLDAITEWADWAGLRFKPRKCATLSIIGARHTSDNNTTFSLQGSHLPSLRPDETYRHLGVPTNPTDSSIFQKITDDITRLDHSKLAPWQKIDATNTILLPRLSFHLLVGSNPKKPLHKLDRHIVKHAKKWLNLPQRASSEIVNIEHDYGGANIPSCYTLAAISQVTQAMHLFTSKDPTICSLALNFLKEVVKKRIYRDPSLEDVCTYLNGSMNDEFGAKSYDISSIWTRLRIATRRLRKTINCEWTPVGDTIAIACDGNLVSRSSCTKILSMKFKAAQLTRLLRKPDQGKAYRCIAKHPASNHFLRSGNYTTFADWRFVHRARLSVVPLHGLRRFGNASKKCRRCSHPQETLAHVLNHCTRNLHIATKRHDAVLGRLQRAIRPDNLQTYVNQQVPGFDSRCRPDLVVVCEDAKTATIVDVSIPFENGQEAFSTARQSKVEKYRSLTDHFRSLGYDTVCDAFILGSLGGYDINNTSIIQRLGISRKYSSTMIKLMVSDTIRWSREIYHHHLQTFR

SEQ ID NO: 33097 - protein, 1113 aa, Helobdella robusta
MANKLILISPNFRYSYYLIIILNLILIVNATKCPYCFKNFVKLSSHSWRCTKSTSISYSNNSIHSTQSDNISISPNLLVDNLNNNNIANMDNNLSICCCGKRCKGRKGLRMHQRSCKMCKSLNSAKPPEDPEENLNLSSSPTHQQTSPPTSASTNIATTETQQPSSPPHQQASSPSPTSQIIVKTDVSLPGIKLPKTTAQWVEANAYFQSQRTALPNIVNINNFTANLQSLIYNYFASTYGTLKQKTNSTTKSDKPTNKLKSELKQLKLLGRNNHNFDTQIITLSRQIRAKISSSKASKIGKILDITSQLKNKFWPTCEKLLKPTCSLLPMFNVEKCKEFFHNILNDPCRNKYCLPNWIQTLPNPSIACNINPPTYNEIFSIIRKCKSRASPCPLDQMSIIILKKCPILRTILHQLLVECWKTSSIPSCWRKGLTILIHKKGDASDPSNFRPITLQPVFYKIFSTFINNRIYKYLDQNNLINKNIQKGFFPKVDGVAEHTQLLTHLLKDAKRHQRTIIVTLLDLRNAFGEVSHDLIPSVLSYHHIPTKVSNLIRSIYADYSINVSVCNKLTSPIQVKRGVLQGDPGSPLLFNLCFNPLMKILEAKEFQQCGYIWGPTAKLKSRGWLQFADDSAIISSSSEGAQKLIDLNQAWCKWTGMKLRIDKCCTFGMRKLDGKYEQFLPQLTIDDATIPQIKMNDHFTYLGVIYDFEGKNTKEKDDLYNKVRVMLQKIGRLDTTVQWKLEILRRFVPSQLSSELRAYNISLTWIENTLDRLVTETVREWLSLPISSCIAEMISLPYKIGGLNIKAFKQHAELLRMRLRWCFKLNSNEEIRTLWSESCKAYRNIDNLIPECNELKPAMKALKQQQYEAYFNHVSLLQCQGILVNSIREHINGSEIVRWSKSTIKLSEVLYKFTRKYLIQQLPTNANLFRWGKSTNVLCSLCNEKQTNKHVLSNCGSASALSRYTNRHNKILTLIIDNIRASARPGIEIFADLEKEMVQPISNLFKSLRPDIAVLSKDTIEVLELTVCHETNFMKSKQYKLNKYINNLKDNILTDFKHFNILINTFEISPIGFYNPFNLSFINVKWTDQFRYSLINNVISSSYAIYCDRNNA

SEQ ID NO: 33098 - protein, 955 aa, Helobdella robusta
MQQKESPPPSTSTSPPTSSPPANNITNNKPLPGIKLPKTTTHWLEANAYFYSQIATLPNITDINNFTTTLQTLIYNYFASNYGTLNQKSSSITTLDKPINKLKSELKQLKLLGRNNHNFDVQISTLSKHIRSKISSAKAIKAEKTVNITSQLKQKFWATCEKLLNPTTALLPLFSVEEANKFFNKILKDPFHNKYRLPNWIEPLTIPSIACNTNPPMYNEIFSIIKKCKSKASPCPLDQMSIIILKKCPILRTILYLLLVECWRTSSIPTCWRKGLTILIYKKGNANDPANFRPITLQPVFCKIFSTFVNNRIYKYLDSNNFINKNIQKGFYPKVGGVAEHTQLLSHLLKDAKRHQRTIIVTLLDLRNAFGEVSHDLISSILSYHHIPNQVNNLIRSIYADYSITVSVCNKLTSPIQVKRGVLQGDPGSPLIFNLCFNPLMKMLEAKQYQQCGYIWRPTANLKSRGWFQFADDSAIIANSSESAQRLINLSQAWCKWTGMKLRTDKCCTFGMRKLDGKYEQFLPQLTIDDEIIPRVNINEGFTYLGIIYDFEDKNTREKDKLHNKLKVMLRKIGGLDITVQWKLEILRRFVPTQISFELRTYNISLTWIENTLNRLVTETVREWLSLPITSCIAEVSSLPYKTGGLNIKSLKQHAEMLRLKLRGYLKLNSNEEMRSLWSESHNNYGKIDNLILVNVELKPAMNALKHKHYETNFNHLSLLQCQGTLVKSIKKYIHSSVITRWSRSTVKLSEVLYKFTRKYLIQQLPSNANLFRWGKTTNASCLLCNATQTNKHVMSNCDSSSALSRYLDRHNKIFKIIIDNFKVDTRPGVEIFADLKGEKIRPITDLFRSLRPDIAVRNKDTLKILELTVCHETNFIKSKQFKMNKYIGNLKDNIIDDFKHCNILINTFEISPIGFYNPFNMSLIDITWTDYFRFSLINSVISSSYALYCDRNNE

SEQ ID NO: 33099 - protein, 1113 aa, Helobdella robusta
MANKLILISPNFRYSYYLIIILNLILIVNATKCPYCFKNFVKLSSHSWRCTKSTSISYSNNSIHSTQSDNILISPNLLVDNLNNNNIANMDNNLSICCCGKRCKGRKGLRMHQRSCKMCKSLNSAKPPEDPEENLNWSSSPTHQQTSPPTSASTNIATTETQQPSSPPHQQASSPSPTSQIIVKTEVSLPGIKLPKTTAQWVEANAYFQSQRTALPNIVNINNFTANLQSLIYNYFASTYGTLKQKTNSTTKSDKPTNKLKSELKQLKLLGRNNHNFDTQIITLSRQIRAKISSSKASKIGKILDITSQLKNKFWPTCEKLLKPTCSLLPMFNVEKCKEFFHNILNDPCRNKYCLPNWIQTLPNPSIACNINPPTYNEIFSIIRKCKSRASPCPLDQMSIIILKKCPILRTILHQILVECWKTSSIPSCWRKGLTILIHKKGDASDPSNFRPITLQPVFYKIFSTFINNRIYKYLDQNNLINKNIQKGFFPKVDGVAEHTQLLTHLLKDAKRHQRTIIVTLLDLRNAFGEVSHDLIPSVLSYHHIPTKVSNLIRSIYADYSINVSVCNKLTSPIQVKRGVLQGDPGSPLLFNLCFNPLMKILEAKEFQQCGYIWGPTAKLKSRGWLQFADDSAIISSSSEGAQKLIDLNQAWCKWTGMKLRIDKCCTFGMRKLDGKYEQFLPQLTIDDATIPQIKMNDHFTYLGVIYDFEGKNTKEKDDLYNKVRVMLQKIGRLDTTVQWKLEILRRFVPSQLSFELRAYNISLTWIENTLDRLVTETVREWLSLPISSCIAEMISLPYKIGGLNIKAFKQHAELLRMRLRWCFKLNSNEEIRTLWSESCKAYRNIDNLIPECKELKPAMKALKQQQYEAYFNHVSLLQCQGILVNSIREHINGSEIVRWSKSTIKLSEVLYKFTRKYLIQQLPTNANLFRWGKSTNALCSLCNEKQTNKHVLSNCGSASALSRYTNRHNKILTLIIDNIRASARPGIEIFADLEKEMVQPISNLFKSLRPDIAVLSKDTIEVLELTVCHETNFMKSKQYKLNKYINNLKDNILNDFKHFNILINTFEISPIGFYNPFNLSFINVKWTDQFRYSLINNVISSSYAIYCDRNNA

SEQ ID NO: 33100 - protein, 1292 aa, Panagrolaimus superbus
MPPKASRNKNREDGIKFVVPFFGRPVCPKCIKSNLVRDYGSVPDCKKHVVNEHDIDFFICCKYCNISCLDMKKMNIHIRSCNVRDKEEVKRYNNKGPIPKADKVRRISNAVTSQPIPPTSSLTSPASQRSSESPPRQRQNPREPLPVTSYPVSERTRSKSRSRSTSISTSIPSSRQPSREPSIEIVESSTTTSQLTGTQPPSLQPIIEEQDLSFTSPTSSPTSSPASEHRPPTLQPFFDVQSVTTSPSTASPALVYHDFDEIDAWVTTEAAISLHSNMLSTEDTPPFNQHAPAYNPDGISIPELDSFNDSTNVTSETAAEPVPATQPVNLDQHNTNASDPWEKRFADCQDSTEFETLYDQFTIFLQTNSKSSSQPTSQNKNAPASTSQNPQQQMPSTEHQQQQRQPNHHHRQQESRSNQQKKHQNQSKEQKKRNDTKAAKKIQALYRLNKKKAFTQITTAGPSQHCQVDAEIVSEHFKNIYAPSDRQPTPPPIEVPPLDPIEGETDPLSKAFTIAEVQERIKNSKNTAPGPDLINYNMLKKKDPTGITLTSIFNTVLRLKHIPEDWNRSSTILIHKKGDPDQLSNWRPIALSNCISKLFASVLAHRLTSWAMSNNRLSKSQKGFLPFEGCLEHNFELQSIIQHAKRTKTTALIAWLDLENAFGSAPHSTIFQSLELAGLHSNSIDLIKLLYANCTTTIRCSTGPTDPIAIKSGVKQGCPLSPIVFNFAIDAVIRAIEHLNLGINLHGKQHSVKGYADDLATIARSAPALEQQMKVASTVSTWSGFKFNAKKCATLHIDGKKHQALRSKFRIQNQAMEVLNEDQSYEHLGVPTGYKLHPSATETIKAMTNQVNKIDASLLAPWQKFDAINTFVVSQLSFHLKGGMVPKKPLNDLDKLIKRLGKKWLSLPQQASPEILYLPYQRGGMNLLPTSLLADVSQVAHAYRLLTSNDHSTRKLAKDSMKEVVEKRLRRSATLKEICQYYNGEYENFPNDSNDYQSTWTRLRAATRRLSHKINIEWKEDSENNVVLVINKVVANRKIVEIQLKDAVRNHFLETLIKKPDQGKVYEVVSKSNYSNHFMHDGNFTRFAEWRFVHRARLGVVPLNGCRRYGNDNNKQCRRCGGPNETLPHVLNHCQPHMPTIRKRHDAIQNRLIKATKLQPNQKLLNDICVPGVVSNLRPDITILDNVNKTATIIDIACPFENRQTAIDAARNEKLSKYQHIKEQLQQKGYKVFLDAFVIGSLGSYDQNNWKCLVELGINRNYAHLMKKLMVSDTIKWSRNIYIEHVTGQRQY

SEQ ID NO: 33101 - protein, 995 aa, Schmidtea mediterranea
MKKVTTIKAKNPPPGSNQTFMCGFCDREFDTARGRGVHESRGHLVERDAAIQSRVKAVVSRKYYYSKEDDVALARMQLEKADLAKCELLEAMYLALGKGRTREAIEQHIRKSLRYKGVLEEQRKLLETARGNVRQNNVGVPASNATKNLQRFLESLPLGTNRREERLDRIIRSNSIESQRLELIHYCNDMCQDFVQLDCQKKPLNAIRRRNPKRLSKKQLKRAKFSALQQLWIKDRKTAAQLVLKDKLDSLLSNKEDSKDLGSYWQQVFERESDLDRRPVPQTVENEELNSPVLEKEVEWAVKNIKKSTAAGPDGLTALSLKKIPYSELVKLFNIILLVGFLPDVLKNSRTILIPKVDNPQGGGDYRPISINSVLTRTLNKILAKRVSNGDFGINGQKGFKSVDGCLENLATVESILADARMKKNQLAVVFLDMSKAFDSVNHESIVRAGEIKGYPKLLMTYVKECYNNATTNVAGVTAKFNRGVKQGDPLSPALFNNVIDLAIERVSGTGIGYNMGGKKYSVVAYADDLVLFGESRKGLQIALTALLEELKLNGLTPNPAKSASLTFEKSGPHWFASTDTVTALGDQIPAMGNIETYKYLGIKFNSCGVVKGSLPGIYTKKLELISKAPLKPQQRLAMLTDFLIPGVLHQAVFGQTNAGDLRNLDKQTRRAVRSWCHFPSDTSTAFIHAKAKDGGMGIPYIRAEFQFGKLERLRKLPNVKDERTQVLANNEHIKKMIKKLGVGIPIKGVRCMNKLEFYNKMHEELIKSNDGIGLKEASLVPSANTWLKLSDLHMSGRTFVGCLKIRGNLMATVTRNSRGGQNPGIELNCKKGCQYQGSLNHIVQQCPVVKGLRIKRHDEVVKYMEEITKKAGWSATMEPIIPFEGSHRKPDLVLVREDLGKVVDIQIVSDLCELDHKNSCKIGKYDNDIIRNYVRGLGPTRVEVAAITLNWRGVWSKDSFNLIKRLGMTEMDAKIISMRVLASTAKIYKTYKKC

SEQ ID NO: 33102 - protein, 981 aa, Schmidtea mediterranea
MCANTNESGFFICHIIQCISIDHNYITIPNISEIRKRLDNLINKVIIDRAPIDNILKYTNILNNIKILQNNNSENPDEGLAEIIRIHECIFPLKHKIRKTDFNPPSTNINKKIELTYKLRFNFNINFICTINKIFNNSINTLSPHPDRIIMNFEREIIIINDIKFKYKLPYYPENFIHKPTTIDEITNTFKIVDLSSLPGKDQISYLDWKKIDPNNSILCSLFNNILFKSFSPLIWKTFKTKLIIKPGKENSSHDLSSWRPLAILDTSYRLFATLINLRLLEWIKLNNLINIKQKAIGCPDGCAEHNSVLLLLNERAVRMGTNINIVWLDLADAFGSISHDLIWHVLINMGINNNTIKLLKNMYYNCNTYYECEKTTTKTIPITNGVKQGYPMSITLFCLTINFIITNILKDHPFIINNYNVSILAYADDIVLISDNCIKITKILTDIIKYTSDVKLKFRPAKCGFYENNRNHDEIPLKIHNEIIPIIDENNIYKYLGVGFGGKSNHNIDNILEKAFTDAEAIFLSDLHPSQKLFAYKTSIHSRLIFPFRTCIVKHMILDCDRNRIVDNSTKQLGFDQKIKRLIKNSIGDIFQNISNNFIYALCSMGGLGIVPSIDEYLIQSTIQLTRLFMSSDLKMKDFIIGELIECVRARFNYLENEIEMAMKWLNGDIDEEKVGKPCLFLKFKKSVHRLNVKFSIICKLTYINNIFSLEISKNDFKIVINNENIDKASKIMHILTGEWYALEWYKMTHQGHIAETIGKSQFSKHLIKSTTLGDNQYFFLIKARNNSLNLNSNPSNHKDKKDVNCRLCKIQWETQAHILNHCTLSQNARRNKHNHVLEVVHNFFASKKFDIDIEKSPPNVDSTLRPDLIIKTTDKNKVKLSLVDIKVPYDIETNFINARKQNLDKYRNLAIETGKANNCKAAVYTIIVGSLGSWDKENNKDLQKLGLKVNEIGEMARMCIKAAIEASYMIFMNHVTNNK

SEQ ID NO: 33103 - protein, 609 aa, Schmidtea mediterranea
MGTNINIVWLDLADAFGSISHDLIWQVLINMGLNNNTIKLFKNMYNNCNTYYECENTTTKTIPITNGVKQGCPMSMTLFCLAINFIITNILKDHPLIINNYNVSILAYADDIVLISDNRIKITKILTDIIKYTSDVKLKFRPGKCGFYENYRNHDEKPLKIYNEIIPIIDENNIYKYLGVGFGGKSNHNIDSILEKAFTDAEATFLSDLHPSQKLFVYKTSIHSRLIFPFRTCIVKHMILDCDRNRIVDNRTKQLGFDQKIKRLIKNSIGDIFQNISNNFIYALCSMGGLGIVPSIDEYLIQSTIQLTRLFMSSDLKMKDFIIGELIECVRARFNYLENEIEMALKWLNGDIDDEKVGKPCLFLKFKKSVYRINVKFSIICKLTYINNIFSLEISKNDFKIVINNENIDKASKIMHILTSEWYALEWYKMTHQGHIAETIGKSQFSKHLIKSTTLGDNQYFFLIKARNNSLNLNSNPSNHKNKKDVNCRLCKIQWETQTHIQNHCTLSQNARRNKHNHVLEVVHNFFASKNFDIDLEKSPHNVDTTLRPNLIIKTTDKNKIKLSLVDIKVFMIMKQILLMHANRILINIGTLLLKLVKLTTAKQQYTLL

SEQ ID NO: 33104 - protein, 1023 aa, Schmidtea mediterranea
MSPNSLQKHNKTAYTLLNTVKNVHNIMYPLNIEMTEFNYPMCTNPTDTGFYICHIIECLSINSSSITIPIIPEIRKRLDYIINKVLRDRAPIDSIIKYKDILNNLKILQNNNTANPNEGLAEIDRIHECLFPNKHKFGKKPSVKIPSTILKNNEIELTSKLRLNFNNKYKITINKIFNNSSNIVPPHPDRIILNFTNELISIKDIEFKYRFPNFNENITHKYTSIEEITETFKIVDLSSSPGKDLISYLDWKKIDPDYSILCALFNNIFFKGNTPLKWKSFKTKLIIKPVKENYCHDLSSWRPFAILDTSYRLFATLMNRRLLEWVKLGNLISINQKAIGYPDGCGEHNSVLLLINERAMRMGSSVNIVWLDLADAFGSVSHDLIWSVLTDMGINYNTLKLLKNMYSDCDTFYECEDTVTKNIPVNNGVKQGCLLSMTLFCLAINFIISNILIDHHFIINDYNVSILEYADDIVLISDNRIKIVKILEDIINYTSTVKLKFRPSKCGFFENNRNHNEKPLTIYDEIIPIIDENNIYKYLGVKFGGKGIHNIDYILEKALTDAEATFSSDLHPSQKLFAYKTSIHARLIFPFRTFTVKHMILDCDRNRIVDNRIKQLGFDQKIKRLIKNAIGDIHQNISNNFLYASCSMGGLGMVASIDEYLIQSIIQLTRLLISNDVAMRGFIVGKLLECVRAPFGNLDDIMDTAINWLNGDAENGKPGKHCLFLKFKKSVHRLKIKFSIICKITYIDNIFKLEISRNNFKTVLNKDNIENASKIMHILTGEWYAHEWYKLIHQGHIAEFVGKSEFSKHLIKSTTLNDNKYYFLIKARNNSLNLNSNPANHNNKKNVNCRLCSLQWETQTHILNHYTLSQNARRNKHNHVLETVYNFFASKKYDIDIEKSPPNVDTTIRPDLIIKTTHKNKTKLSLVDIKVPYDEPINFTNARKLNIEKYRDIAIETGKKNNCKGAVYTIIVGSLGSWDSENNKDLKQLGLCEIEIKTLGRMCIKAAVEASYMIYMNHVTNNK

SEQ ID NO: 33105 - protein, 932 aa, Macrostomum lignano
MESRPELTTKPKKTNIKYRKNPKKDDRVGNAGPSSSMGSGACSPRLEGIPEVGSEEVNKVEAEASRGINRKAVEWVLSIEPVKGYEKQCSEIRLAIEGEKWVECSELVEACFLSYRDEKKSNAKRPVRKKAVKRELKNREKRRRAYGEMQRIYSKDRKKAAAAVFSGAWRLWSEPREENKQFEDQKMEYWKRVLGRESDPDGRPVKPLREPAVEIEEPISLAECKKALRDLKQTASGPDGVSWNSVKSLGPGWLQYLFNSILACGYPTKSFKNSRTVLIPKTEKPSDPGEFRPLAIASVFGRVFHRILASRLGVWAPLGASQRAFQVGIDGVSMNHLILEAALAAARRGDSELYLAWLDLRKAFDSVNHQSLLRAARRAGLPESILGYLGNLYDGAVTELNGVAIKISRGVKQGDPLSPILFCYVIDELMDNLDSGIGFPLAGHRVNAAAFADDLAILSRSKAGLQALLASLADSLLPTGLEVNPAKCSTLAIIWDGKNKRWLHDAKGQFKFRGSTLPALGVEESYKYLGLQYGSKGKLKTGLELLKGMLRELKEAPLKPQQRVFLLRTNILPKIMYYLVNGRVHQYTLRECDKCVRRFLREVLHLPHDTPVSAFHACAKDGGLDIDCFESLVPMYKWQKLVSLEEVPDNLVRDLSQLPAIRKRFQLKGAQTSFNNRAEYRVFWKNKLLDNLDGFGLGEAADVPQVHSWVTDGSSLLTGEMYIKCLKIRWNVWPTAARASRGRRQAPLCDAGCRQIEGLGHILQQCNRTWDKRGARHDRIVEFVGSQVERLGFNVIKEKSFATPRGHRRPDLIIYNKDRVWIADVTICADRGAGPMALARDNKIKYYTDDDLATEVAKVAGPGAQSVVGLVWNWRGCCEKKTDEWLKKMGVPIESRRLASVRVLEGSVWCAEVFRKRTGINFAQVGGRNRSE

SEQ ID NO: 33106 - protein, 999 aa, Galerucella tenella
MPVNLMDVARNSKPKPVKVSTNNGVIVTDMMLNKILVESRQDGMLKKNLFLARLEAKLALKGSKNIVHELQIVFPHRSLEAIKSQRRYADHKTLVEQMMEEITSSIDVRNHDFRTHQRASDDQKEPNLSHTPIDDDLSFAEVKSMIVCFINQLDPLSNNNNIFNYDRLNLICRSMKNWSRAQTFEELTLYLLETFPPKAKLKYTRPNVPSKKASSRRATRRTEYALFQNAWKRNRMNTVRALLKYCQTSSAPNKEVMIPFWEQIMSSNYTTAPGVTINREVETDLWIPILPKEIRAAYPEMGTSAGPDGLFARDLRSIPSGIITRIFNILLLCGRLPEHLLESRITLIPKKNEASAPGDFRPITVSSILTRTFQKILATRMNNIIKLDARQNAFRPIDGCSENIFLMDFALRYCRNSLKPFFMALLDVTKALDSVTHQTILDTLRSFGVPNLMIEYIADTYEGSVTRLHCDDWESHMIHPTCGVKQGDPLSPIIFNLVIDRLFARLPSETGIKIGEMTLNAIGYADDLVLFATTPQGLQTLLDSSASYLLERGLNVNATKCFTVALKTVAKDKKSVVDTKQVFRCMRRQLPALKRSDDWRYLGVPFTPNGRIISSPLGLLRQQLNILSLAPMKPQQRLFALRTVLLPGLFHNLVLGMTNISLLNKIDTVNRAFIRKWLALPHDVPNAYFHADVKDGGLSIPNFRWTIPLQRLNRLKRLKGCETGKIPPDMERFKNREIQRTMLRLSDHEMNITTLADYKRRFARLLYLSNDGQLLSNSRAVETQHQWITDGNLFVSGHDFVHMNKLRINAIPLRARMSRGQIRTRRCRAGCDDAETLHHVLQLCHRSQHLRLRRHDACLDYLLKKKQFQQYRIFKEPKFRTSQGLLKPDLVIKQDQPAIVIDALVAGERVNLDSAHQAKINKYSGLENDIKYRYSVSNVAFTSLTISSRGVWSKASFQRLQNLGLLQADDAKILSTRVLIGGLAIINNLHSTTMVRYHR

SEQ ID NO: 33107 - protein, 973 aa, Cerceris rybyensis
MQRAHRDWYDGQQGTTGTKSRWTSEEAALLARKEAELTIQGTRFLNIELEKGFPGRTLESIKGQRRKQQHKYLVVRLVTETIARVEARNTTCEPPRPENVANENDDAFLDYVQRLPHLNSNEFHSLHLQRICDAASTDGKSSTLEKLALYLQEVFRKSPPKRPQQDKRRQRPPVTISNRKKRRMAYAAVQIQWKKNRKACISSILSGIRSTNQPPRDVMAPFWNAVMAGSSNEEPRLNTATECLEDVWCPVTPDEIRLTRPSALAAAGPDGVSARLYRSIPSGVLCRLFNLFLWCRRLPSHLYVSRTVFIPKKDGASAPGDFRPITVPSILVRGLHKILARRLTAKGNIDERQRAFWSTDGCADNTFILDMILRYHRKQFKSVYVASLDISKAFDAVSHEAILAVLRASGLPPPMVEYLRQTYKESSTILQGESGWTQPLRPRRGVKQGDPLSPPLFNLLTNLLLKTLPSDVGARIGERTLNSAAFADDLLLFAATPNGLQELTNTATSFINNCGMSINSDKSHTISVVGLPHQKKSVINAGIRFECQGNTLPAITPTGEWRYLGIKLSTSGKCKVKPSEIIDEDITALSKAPLKPQQRIFALKFLVIPRLYHQLALGNVTIGCLNKTDILIRTAVRKWLNLPHDTPTAYFHATTSDGGLGIPSLRWEAPLLHKQRAERLRGKYASSGNIADAFLTEEISRTTRRLQDHGAILESSKDIARRWANRLYTSSDGSALKESSKVPQQHQWLNDGNRLLSGRDYVNCVRLRIGALPTKSRLKRGRPGDRNCRGGCLAKETLNHVLQQCHRTHGERIRRHYAIVSYIARGMKRSGFTTTIEHKFQTPDGLRKPDILGIMGNRALIVDAQVVSEQADLERAHTTKKDYYGDNRAISRTLTQDHSVEEVSVTTATLSCRGIWAPSSVRDLLGLGVIKKKDLKILSTRTLIGGLTAFWAFNKRTGTIHSATPHPPRTGIG

SEQ ID NO: 33108 - protein, 1124 aa, Nysson spinosus
MALSLNDMVQHIKRHHGDASVKFICTKCQKEYQRKHPAECHLAKCKGQGAPQGSNMITCGECGAQFKTKSGLSQHMRHRHPLARNEARAAGSARGEQAPRGGRVFSKEDIQLMMELEVRFQGERNVAKKMKEYLPEKEIKQIRDKRREPAYKKWVENYKRILHPQEHENRESMPRSDESSSSSDDVWEEACEVLPAEPVSGNQEAPGDEDLTRPITQVPSPPESSAAPLEWRSGIIRAALAAESPRRPIPADAAATVQLLVKALEKIEDTDTVLSQPDLDILYSQVANYLLAGGRCEAPESAVERRKPSQRAKKRKRREYIYARSTKLYKENPGLLAKFVREGVDWYGEERQEISTSDIRDLYTSLWGHKHTLEVPDMGDPEEPIELKNILTPITTQEVRKRIAQTKASTAPGPDLIKKGHLLHWVKQEIIRLLFTVIMITGRQPAQWRKNRTTLLPKEGKDGRDVNNYRPITISSLLARLYWGIIDQKLRKQVKLTSRQKGFTAESGCFNNVHILNELLRHGKRSSGLVVVQLDVSKAFDTVPHNAIVAALRRKGLPEHTISMVEDSYKDVHTVIKNGTEQVDIQLQRGVKQGDPLSPLIFNLVMEPLLLELERSSGYSINDTTSVSSLAFADDIILIAQTVPKASELLGKVEAYLQGLGMKLSANKSTCFHIKTTKDSWFLADPEISSSSGERIPYTDAGSKIKYLGVEISPWAGISLEGLRESLCTTLKRVMRLALKPHQKVDLLSTYLIPHYLYSLAISIPPITYLRQLDQELRVVVKNIYHLQQSTADGLIYCCKRDGGLGFPKLEAIVVASCLRAGLRFAQSDDPAMQALAEGTGMVNRLKSLAVSARINWPIDTRGLRTYKKGVKRAELARWASLSTQGKSVKSLADDKIGNAWLQRPELLKPGRFITALKLRTNTTANRVVLNRATQMADIKCRKCRELPETLAHILGQCTYTKRQRIRRHDEIKDLIIERVAKRDKEAVIVEEPTIPNPLGGNLKPDLVIKSQAGVFVVDVTVRHEDNDYLAQGQADKNRKYSPLLPLLRRKFQSRAAEVLPIVVGTRGAMPRETVQALRKLDIRDRQTLITISMIALRSSIEIYHTFMDYDAPRVPVEDLDPPG

SEQ ID NO: 33109 - protein, 1005 aa, Nysson spinosus
MALSLNDMVQHIKRHHGDASVKFICTKCQKEYQRKHPAECHLAKCKGQGAPQGSNMITCGECGAQFKTKSGLSQHMRHRHPLARNEARAAGSARGEQAPRGGRVFSKEDIQLMMELEVRFQGERNVAKRMKEYLPEKEIKQIRDKRREPAYKKWVENYKRILHPQEHENRESMPRSDESSSSSDDVWEEACEVLPAEPVSGNQEAPGDEDLTRPITQVPSPPESSAAPLEWRSGIIRAALAAESPRRPIPADAAATVQLLVKALEKIEDTDTVLSQPDLDILYSQVANYLLAGGRCEAPESAVERRNPSQRAKKRKRREYIYARSTKLYKENPGLLAKFVREGVDWYGEERHEISTSDIRDLYTSLWGHKHTLEVPDMGDPEEPIELKNILTPITTQEVRKRIAQTKASTAPGPDLIKKGHLLHWVKQEIIRLLFTVIMITGRQPAQWRKNRTTLLPKEGKDGRDVNNYRPITISSLLARLYWGIIDQKLRKQVKLTSRQKGFTAESGCFNNVHILNELLRHGKRSSGLVVVQLDVSKAFDTVPHNAIVAALRRKGLPEHTISMVEDSYKDVHTVIKNGTEQVDIQLQRGVKQGDPLSPLIFNLVMEPLLLELERSSGYSINDTTSVSSLAFADDIILIAQTVPKASELLGKVEAYLQGLGMKLSANKSTCFHIKTTKDSWFLADPEISSSSGERIPYTDAGSKIKYLGVEISPWAGISLEGLRESLCTTLKRVMRLALKPHQKVDLLSTYLIPQYLYSLAISIPPITYLRQLDQELRVVVKNIYHLQQSTADGLIYCCKRDGGLGFPKLEAIVVASCLRAGLRFAQSDDPAMQALAEGTGMVNRLKSLAVSARINWPIDTRGLRTYKKGVKRAELARWASLSTQGKSVKSLADDKIGNAWLQRPELLKPGRFITALKLRTNTTANRVVLNRATQMADIKCRKCRELPETLAHILGQCTYTKRQRIRRHLIERVAKRDKEAVIVEEPTIPNPLGGNLKPDLVIKS

SEQ ID NO: 33110 - protein, 1001 aa, Nysson spinosus
MRHRHPLARNEARAAGSARGEQAPRGGRVFSKENIQLMMELKVRFQGERNVAKKMKEYLPDKEIKQIRDKRREPAYKKWVENYKRILHPQEHENRESMPRSDESSSSSDDVWEEACEVLPEEPASSNQEAPGDEDLTRPITQVPSPPESSAALLEVEWRSGIIQAALAAESPRRPIPADAAAIVQLLVRALEKIEDTDTVLSQPDLDILYSQVVNYLLARGRCEAPESAVERRNPNQRARKRKRREYIYARSTKLYKENPGLLAKFVREGVDWYGEERHEINTSDIRDLYTSLWGHKHTRQVPDMGDPEAPIELNRILTPITAQEVRKRIAQKKASTAPGPDLIKKGHLLHWVKQEIIRLLFTVIMITGRQPAQWRKNRTILLPKEGKDGRDISNYRPITISSLLARLYWGIIDQKLRKQVKLTSRQKGFTAESGCFNNVHILNELLRHGKRSSGLVVVQLDVSKAFDTVPYNAIVAALRRKGLPDHTINMVEDSYKDVYTTIKNGTEQVDIQLQRGVKQGDPLSPLIFNIVMEPLLLELERSSGYSINDTTSVSSLAFADDIILIAQTVPKASELLGKVEAYLEGLGMKLSANKSTCFHIKTTKDSWFLADPEISSRSGERIPYTDAESKIKYLGVEISPWAGISLEGLRESLCTTLKRVMRLALKPHQKVDLLSTYLIPHYLYSLGISIPPITYLRQLDQELRVVVKNIYHLQQSTADGLIYCCKRDGGLGFPKLEAIVVASCLRAGLRFTQSDDPAMQALAEGTGMVNRLKSLAVSARINWPIDTRGLHTYKKGVKRAELARWASLSTQGKSVKSLTDDKIGNAWLQTPEFLKPGRFITALKLRTNTTANRVVLNRATPMADIKCRKCREFPETLAHILGQCTYTKRQRIRRHDEIKDLIIERVAKRDKEAVIVEEPTIPNPLGGNLKPDLVIKSQAGVFVVDVTVRHEDNDYLAQGQADKYRKYSPLLPLPRRRSPAHSGGNTGCYAQGDGPSSQET

SEQ ID NO: 33111 - protein, 1036 aa, Ocypus olens
MSRSFTPHIVPPPVTPNQVDSGLLPDHEEMDHPPMPPGSAMESSQTNTTYYISDEDLLNVALPPTPNNNVVEYPPTPLQDNHSNIINTSAMLIETMEPRVSLPATHHTIEPNSPRLTEQQKHWIQKISMCRNAVDLNKMVENITGEWSKSSDTPPKPSNNERPRPRPRPVRREGYDGNEASKIQKLYRSRKKKAYQRITQGAPNYCTIEEDTLLNHFRKMCQSNTETSDCYDLLPSAPADNLERPIREDEITGRLNKMANTAPGKDGIKYNIIRKVDPGCYILAALYNKVLELNTIPNSWKTAQIILIHKKGPTEDPGNWRPISLCSTIYKLFASCLAGRISEWAQEHEILSKCQKGFGKGEGCYEHNFVLQSVLDHTRRKQKHAVVAWLDLANAFTSVPHCHLIKTLRTIGLPNRLCSLLTDLYTGNTATIRCNSGDSTPFNVGAGVKQGCPLSPVLFNLAIEPVIRSVTSLNKGFTIDDQMINVLAYADDLVIITSNEEDMRQALKAAGETAKKCGLTFKPSKCATLDLDCRRRRQVNITPYNIQGEAMQVLNEGDEYTHLGVPTGYHIDATPHDTITKMMDELGKVDQSLLAPWQKIDALNTFILPQLAFILRGTHVQKKTLKAFDKLQGKCLKKWLNLPQRASTEILYLNNHQGGTDAIPLCTWTDLAAVIQGFRMLHTQDTTVNNIARSQLYDVTRRRLARAPSQEDIAKYLSGDLENEFGRDGGDIMSLWTRVRNATRRLSNTLGLKWIWQPIHEQLCLCVGRDNQTIIPPTESGRKATEKTLKGAFRAHLAASLCKKKDQGKVFECTSLWSASNHYMRTGLATRFCDWRFIHRARLDCVPLNATKRFGNNNKLCRRCGKANETLPHVLNHCQMHSAAWQKRHNNIQDRLAKALPPRSGRVKINNKVEGSSGNLRPDITIYDDTAKIIRLIDVAIPFENGRNALLASADAKRTKYQALVEEMRGKGFTVSFHPFQIGALGAWDPANEDVLRELKIPRKYSSLMRKLMVSDTIKWSRDIYIEHLSGRRQYE

SEQ ID NO: 33112 - protein, 928 aa, Agriopis aurantiaria
MSQFLISRHACSTPMSTNSDIPFEQLLSNLNSKVRVVKRIPRGARLSLAKSLSIAINKCIDHQHHSSESWQELLTFAYRHFHAPSNNKKSLTAVLKSNCNANNCNFNFDISRTPAKPHNIYKIVENKAMDGDLRNAARILFSDDTLAPNNAQTLDALRDKHPSANSTSLLPNPPTPNLSALEIKIEDTLDAIMSFPNGSAGGIDGITPQHLKDLTSVSVGDVGRTLANDITKFCNFLFDGSISDTFKPFLFGARLCAFNKKDGGVRPIAIGCTFRRLASKLACRKISPKLTPLFQPIQLGFGSRGGCEAAVHSVRTFLSTDGEADVLLKVDVKNAFNCINRSTLLNEVYIHTPEVYNYIWQCYSSQSKLFYYDKQLSSEAGVQQGDPLGPALFGLGIHPIISNLNSKLNVWYLDDGTLGGKVDTVKNDFTRIINNFGKINLELNLGKCELFVSSKFNDHDREVIIQSFRDIAPEIKILEKNSLYLLGAPLFEDSVGPLLEKKSNILSVNINRLGFLNSHIAYTILKYCLFVPNFTYILRACPIWKHTQFLESLDATLKTSLEKILNLILENNSWIQASLPIRSGGIGIRKISSVALPAFLSSVHSVSKLCSSILKTSSVRIHCAADAIEAWKTVCPNGDIPKEPKRQKLWDAPLVQKVQQDLTQNSFSDQDRARLLAVFEHESGQWLHALPSANLGTLFDNGSFRIAIGLRLGAAIVERHLCPCGSGVDKNGLHGLYCQRSAGRFSRHGSINDIIKRALATINIPAVLEPVGIVRDDGKRPDGLTLIPWERGRALVWDATCVDTLAPSHLRGTIQKAGAAAEAAEDAKRRKYASLSSEYIFVPLGVETFGPWGPCTKKFLKKISPHLIDAAGDKRAGSFLAQRISLAIQRGNAASVLGTLPHGQHLFFLIFNYISDNLYVIISISVNN

SEQ ID NO: 33113 - protein, 1062 aa, Cosmia trapezina
MQSSLLSPSRDEYLTPIGSDEDTPSPRPPPLPQPVQCCRRPQFNITRVGSDDEDVPSPRLPPLPQPVQCCRRPQFNITTVGSDDEDVPSPRLPPLPQLVQRSRQPESSILNMNVDPCVFLTCEQCSDGRQFKGRRGLNIHIGKTHKNVPLSSHNPNPSTSQSTDLLVSATSNIHFDKHLSDLNSKVPIVKRIPRGARVSLARALSAAINNCIQNQSNNTESWQELLTFSYRHFHAPSNSNKSLTSLLKSNCTTSNFQNHTDVTHIPKKTYNINKIVESKAMDGDLRNAARILFSDDTLAPNNDETEERLRDKHPSAIRTSLTLNPCTPSDSTFQVKIEDTLDAIMSFPNGSAGGIDGITPQHLKDLVSVSVGDVGRTLLCDITKFCNFLFVGTISDSFKPFLFGARLCAFNKKDGGIRPIAVGCTFRRLASKLVCRNISQNLKSLFQPTQLGFGSRGGCEAAVHSVRTFLSHDSEADVLLKVDVKNAFNCIDRSTLLNEASIHTPGAYNYIRQCYSSHSKLFYNDKQISSEVGVQQGDPLGPALFSLGIHPIISNLNSKLNVWYLDDGTLGGKADTVKNDFINIINNFRNLNLDLNLGKCELYISDKFNPCDRKILIQNFQEISPEIKILQIDSLYLLGAPLLEESLRPLLEEKSRILSEHVNRLGTLNSHIAYTILKYCLFVPKFTYILRACPIWKHTDILENLDATLKNALEKILNLNLEDNSWTQATLPISSGGIGIRKISSVALPAFLSSVHSVTNLCSQILNTPTLELHCASDAIEAWKTLCPNENFPKEPTSQELWDVPLVQRVHKNLVQNSFSDQHRARLLAVSTFESGQWLHALPSVNLGTLFDNGSFRIAVGLRLGAAIVERHRCSCGSDVDKNGLHGLYCQRSAGRFSRHGSINDIIKRTLATINVPSLLEPLGMVRDDGKRPDGLTLIPWERGRALVWDATCVDTLAPSHLSGSVLRAGAAAEAAEEAKRRKYVTLSSDYIFVPLGFETFGPWGPSTIKFFKQLFPRLVDAAGDRRAGSFLAQRIAIAIQRGNAASVLGTMPHGHPLLLDF

SEQ ID NO: 33114 - protein, 1009 aa, Agriopis aurantiaria
MDSSREEYSTPIGSDEEFDPGPPPPPQSVRRCRRPPDNPPRLSSSPLPQPAERPEVIFSLTANSQCNNNYFQCNQCSDGRQFKGRRGLNIHIAKIHNQIPFSDQITISRHACSTPMSTNSDIPFEQLLSNLNSKVRVVKRIPRGARLSLAKSLSIAINKCIDHQHHSSESWQELLTFAYRHFHAPSNNKKSLTAVLKSNCNANNCNFNFDISRTPAKPHNIYKIVENKAMDGDLRNAARILFSDDTLAPNNAQTLDALRDKHPSANSTSLLPNPPTPNLSALEIKIEDTLDAIMSFPNGSAGGIDGITPQHLKDLTSVSVGDVGRTLANDITKFCNFLFDGSISDTFKPFLFGARLCAFNKKDGGVRPIAIGCTFRRLASKLACRKISPKLTPLFQPIQLGFGSRGGCEAAVHSVRTFLSTDGEADVLLKVDVKNAFNCINRSTLLNEVYIHTPEVYNYIWQCYSSQSKLFYYDKQLSSEAGVQQGDPLGPALFGLGIHPIISNLNSKLNVWYLDDGTLGGKVDTVKNDFTRIINNFGKINLELNLGKCELFVSSKFNDHDREVIIQSFRDIAPEIKILEKNSLYLLGAPLFEDSVGPLLEKKSNILSVNINRLGFLNSHIAYTILKYCLFVPNFTYILRACPIWKHTQFLESLDATLKTSLEKILNLILENNSWIQASLPIRSGGIGIRKISSVALPAFLSSVHSVSKLCSSILKTSSVRIHCAADAIEAWKTVCPNGDIPKEPKRQKLWDAPLVQKVQQDLTQNSFSDQDRARLLAVFEHESGQWLHALPSANLGTLFDNGSFRIAIGLRLGAAIVERHLCPCGSGVDKNGLHGLYCQRSAGRFSRHGSINDIIKRALATINIPAVLEPVGIVRDDGKRPDGLTLIPWERGRALVWDATCVDTLAPSHLRGTIQKAGAAAEAAEDAKRRKYASLSSEYIFVPLGVETFGPWGPCTKKFFKKISPHLIDAAGDKRAGSFLAQRISLAIQRGNAASVLGTLPHGQHLFF

SEQ ID NO: 33115 - protein, 1027 aa, Hylaea fasciaria
MQSPLLSPSRDEYLTPAGSDEDAPSPRSPPPPQSVRRCRRPFYNITPDGSDDEDVPSSRSPPLPVQRGRRPESPAFYTNVGPSGLLTCNQCSDGRQFKGRRSLNIHIGKTHRNLSSSQNINLSSSQSPDLLSSAIPDMPFDKYLSELNSKVPIVKRIPRGARVSLAKSLSAAINNCIENQSKNSKSWQELLTFTYRHFHAPSNSNKSLTSILKSNCSTNHIPNPVDVIHVPSKKYNLNKIAESKAMDGDLRNAARILFSDDTLAPNNDETLESLRAKHPCANPTSFSLNPSPPSDSTLQVKIEDTLDAIMSFPNGSAGGIDGLTPQHLKDLVSVSAGDVGRTLLSDITKFCNFLFVGRISDSFKPFLFGARLCAFNKKDGGIRPIAVGCTLRRLASKLICRHISPKLKDLFQPNQLGFGSRGGCEAAVHSVRTFLSRDSEADVLLKVDVKNAFNCIDRSSLLNEVSTHIPNTLNYIGQCYSSPSKLFYNDKQISSEVGVQQGDPLGPALFSLGIHPITSNLNSKLNVWYLDDGTLGGKADTVKNDFITVINNFRNLNLELNLGKCELYISDKFNSTDRKDLIQNFQEISPDIKILQMDSLYLLGAPLLEESVRPLLEQKSKILSENADRLGSLNSHIAYTILKYCLFVPNFTYILRACPIWKHTDILDNLDATLKNALEKILNLNLEDNSWTQATLPIRSGGIGIRKISSIALPAFLSSLHSVSSLCAQILKTPAPVLHCAADAVEAWKTLCPSENFPKEPTSQTLWDVSLVQRTHNYLVQNSSSDQDRARFLAVSQHESGQWLHALPSANLGTLLDNGSFRIAVGLRLGAAIVESHRCPCGSVVDRNGLHRLFCQRSAGRFSRHGSINDIIKRALATINVPSTLEPVGMVRDDGKRPDGLTLIPWERGRALVWDATCVDTLAPSRLSGSVLKAGAAAEAAEEAKRRKYVTLSSDYIFVPLGFETFGPWGPSSKKFFNNLFSRLVDAAGDKRAGSYLAQRIAIAIQRGNAASVLGTMPHGHPLLLDL

SEQ ID NO: 33116 - protein, 1009 aa, Agriopis aurantiaria
MDSSREEYSTPIGSDEEFDPGPPPPPQSVRRCRRPPDNPPRLSSSPLPQPAERPEVIFSLTANSQCNNNYFQCNQCSDGRQFKGRRGLNIHIAKIHNQIPFSDQITISRHACSTPMSTNSDIPFEQLLSNLNSKVRVVKRIPRGARLSLAKSLSIAINKCIDHQHHSSESWQELLTFAYRHFHAPSNNKKSLTAVLKSNCNANNCNFNFDISRTPAKPHNIYKIVENKAMDGDLRNAARILFSDDTLAPNNAQTLDALRDKHPSANSTSLLPNPPTPNLSALEIKIEDTLDAIMSFPNGSAGGIDGITPQHLKDLTSVSVGDVGRTLANDITKFCNFLFDGSISDTFKPFLFGARLCAFNKKDGGVRPIAIGCTFRRLASKLACRKISPKLTPLFQPIQLGFGSRGGCEAAVHSVRTFLSTDGEADVLLKVDVKNAFNCINRSTLLNEVYIHTPEVYNYIWQCYSSQSKLFYYDKQLSSEAGVQQGDPLGPALFGLGIHPIISNLNSKLNVWYLDDGTLGGKVDTVTNDFTRIINNFGKINLELNLGKCELFVSSKFNDHDREVIIQSFRDIAPEIKILEKNSLYLLGAPLFEDSVGPLLEKKSNILSVNINRLGFLNSHIAYTILKYCLFVPNFTYILRACPIWKHTQFLESLDATLKTSLEKILNLILENNSWIQASLPIRSGGIGIRKISSVALPAFLSSVHSVSKLCSSILKTSSVRIHCAADAIEAWKTVCPNGDIPKEPKRQKLWDAPLVQKVQQDLTQNSFSDQDRARLLAVFEHESGQWLHALPSANLGTLFDNGSFRIAIGLRLGAAIVERHLCPCGSGVDKNGLHGLYCQRSAGRFSRHGSINDIIKRALATINIPAVLEPVGIVRDDGKRPDGLTLIPWERGRALVWDATCVDTLAPSHLRGTIQKAGAAAEAAEDAKRRKYASLSSEYIFVPLGVETFGPWGPCTKKFFKKISPHLIDAAGDKRAGSFLAQRISLAIQRGNAASVLGTLPHGQHLFF

SEQ ID NO: 33117 - protein, 951 aa, Cosmia trapezina
MNVDPCVFLTCEQCSDGRQFKGRRGLNIHIGKTHKNVPLSSHNPNPSTSQSTDLLVSATSNIHFDKHLSDLNSKVPIVKRIPRGARVSLARALSAAINNCIQNQSNNTESWQELLTFAYRHFHAPSNSNKSLTSLLKSNCTTSNFQNHTDVTHIPKKTYNINKIVESKAMDGDLRNAARILFSDDTLAPNNDETEERLRDKHPSAIRTSLTLNPCTPSDSTFQVKIEDTLDAIMSFHNGSAGGIDGITPQHLKDLVSVSVGDVGRTLLCDITKFCNFLFVGTISDSFKPFLFGARLCAFNKKDGGIRPIAVGCTFRRLASKLVCRNISQNLKSLFQPTQLGFGSRGGCEAAVHSVRTFLSHDSEADVLLKVDVKNAFNCIDRSTLLNEASIHTPGAYNYIRQCYSSHSKLFYNDKQISSEVGVQQGDPLGPALFSLGIHPIISNLNSKLNVWYLDDGTLGGKADTVKNDFINIINNFRNLNLDLNLGKCELYISDKFNPCDRKILIQNFQEISPEIKILQMDSLYLLGAPLLEECVRPLLEEKSRILSEHVNRLGTLNSHIAYTILKYCLFVPKFTYILRACPIWKHTDILENLDATLKNALEKILNLNLEDNSWTQATLPISSGGIGIRKISSVALPAFLSSVHSVTNLCSQILNTPTLELHCASDAIEAWKTLCPNENFPKEPTSQKLWDVPLVQRVHKNLVQNSFSDQHRARLLAVSTFESGQWLHALPSVNLGTLFDNGSFRIAVGLRLGAAIVERHRCSCGSDVDKNGLHGLYCQRSAGRFSRHGSINDIIKRTLATINVPSLLEPLGMVRDDGKRPDGLTLIPWERGRALVWDATCVDTLAPSHLSGSVLRAGATAEAAEEAKRRKYVTLSSDYIFVPLGFETFGPWGPSTIKFFKQLFPRLVDAAGDRRAGSFLAQRIAIAIQRGNAASVLGTMPHGHPLLLDF

SEQ ID NO: 33118 - protein, 1060 aa, Cosmia trapezina
MQSSLLSPSRDEYLTPIGSDEDTPSPRPPPLPQPVQCCRRPQFNITRVGSDDEDVPSPRLPPLPQPVQCCRRPQFNITTVGSDDEDVPSPRLPPLPQLVQRSRQPESSILNMNVDPCVFLTCEQCSDGRQFKGRRGLNIHIGKTHKNESSHNPNPSTSQSTDLLVSATSNIHFDKHLSDLNSKVPIVKRIPRGARVSLARALSAAINNCIQNQSNNTESWQELLTFSYRHFHAPSNSNKSLTSLLKSNCTTSNFQNHTYVTHIPKKTYNINKIVESKAMDCDLRNAARILFSDDTLAPNNDETEERLRDKHPSAIRTSLTLNPCTPSDSTFQVKIEDTLDAIMSFPNRSAGGIDGITPQHLKDLVSVSVGDVGRTLLCDITKFCNFLFVGTISDSFKPFLFGARLCAFNKKDGGIRPIAVGCTFRRLVSKLVCRNISQNLKSLFQPTQLGFGSRGGCEAAVHSVRTFLSHDSEADVLLKVDVKNAFNCIDRSTLLNEASIHTPGAYNYIRQCYSSHSKLFYNDKQISSEVGVQQGDPLGPALFSLGIHPIISNLNSKLNVWYLDDGTLGGKADTVKNDFINIINNFRNLNLDLNLGKCELYISDKFNPCDRKILIQNFQEISPEIKILQMDSLYLLGAPLLEESVRPLLEEKSRILSEHVNRLGTLNSHIAYTILKYCLFVPKFTYILRACPIWKHTDILENLDATLKNALEKILNLNLEDNSWTQATLPISSGGIGIRKISSVALPAFLSSVHSVTNLCSQILNTPTLELHCASDAIEAWKTLCPNENFPKEPTSQKLWDVPLVQRVHKNLVQNSFSDQHRARLLAVSTFESGQWLHALPSVNLGTLFDNGSFRIAVGLRLGAAIVERHRCSCGSDVDKNGLHGLYCQRSAGRFSRHGSINDIIKRTLATINVPSLLEPLGMVRDDGRRPDGLTLIPWERGRALVWDATCVDTLAPSHLSGSVLRAGAAAEAAEEAKRRKYVTLSSDYIFVPLGFETFGPWGPSTIKFFKQLFPRLVDAAGDRRAGSFLAQRIAIAIQRGNAASVLGTMPHGHPLLLDF

SEQ ID NO: 33119 - protein, 1062 aa, Cosmia trapezina
MQSSLLSPSRDEYLTPIGSDEDTPSPRPPPLPQPVQCCRRPQFNITRVGSDDEDVPSPRLPPLPQPVQCCRRPQFNITTVGSDDEDVPSPRLPPLPQLVQRSRQPESSILNMNVDPCVFLTCEQCSDGRQFKGRRGLNIHIGKTHKNVPLSSHNPNPSTSQSTDLLVSATSNIHFDKHLSDLNSKVPIVKRIPRGARVSLARALSAAINNCIQNQSNNTESWQELLTFSYRHFHAPSNSNKSLTSLLKSNCTTSNFQNHSDVTHIPKKTYNINKIVESKAMDGDLRNAARILFSDDTLAPNNDETEERLRDKHPSAIRTSLTLNPCTPSDSTFQVKIEDTLDAIMSFPNGSAGGIDGITPQHLKDLVSVSVGDVGRTLLCDITKFCNFLFVGTISDSFKPFLFGARLCAFNKKDGGIRPIAVGCTFRRLASKLVCRNISQNLKSLFQPTQLGFGSRGGCEAAVHSVRTFLSHDSEADVLLKVDVKNAFNCIDRSTLLNEASIHTPGAYNYIRQCYSSHSKLFYNDKQISSEVGVQQGDPLGPALFSLGIHPIISNLNSKLNVWYLDDGTLGGKADTVKNDFINIINNFRNLNLDLNLGKCELYISDKFNPCDRKILIQNFQEISPEIKILQMDSLYLLGAPLLEESVRPLLEEKSRILSEHVNRLGTLNSHIAYTILKYCLFVPKFTYILRACPIWKHTDILENLDATLKNALEKILNLNLEDNSWTQATLPISSGGIGIRKISSVALPAFLSSVHSVTNLCSQILNTPTLELHCASDAIEAWKTLCPNENFPKEPTSQKLWDVPLVQRVHKNLVQNSFSDQHRARLLAVSTFESGQWLHALPSVNLGTLFDNGSFRIAVGLRLGAAIVERHRCSCGSDVDKNGLHGLYCQRSAGRFSRHGSINDIIKRTLATINVPSLLEPLGMVRDDGKRPDGLTLIPWERGRALVWDATCVDTLAPSHLSGSVLRAGAAAEAAEEAKRRKYVTLSSDYIFVPLGFETFGPWGPSTIKFFKQLFPRLVDAAGDRRAGSFLAQRIAIAIQRGNAASVLGTMPHGHPLLLDF

SEQ ID NO: 33120 - protein, 1062 aa, Cosmia trapezina
MQSSLLSPSRDEYLTPIGSDEDTPSPRPPPLPQPVQCCRRPQFNITRVGSDDEDVPSPRLPPLPQPVQCCRRPQFNITTVGSDDEDVPSPRLPPLPQLVQRSRQPESSILNMNVDPCVFLTCEQCSDGRQFKGRRGLNIHIGKTHKNVPLSSHNPNPSTSQSTDLLVSATSNIHFDKHLSDLNSKVPIVKRIPRGARVSLARALSAAINNCIQNQSNNTESWQELLTFSYRHFHAPSNSNKSLTSLLKSNCTTSNFQNHTDVTHIPKKTYNINKIVESKAMDGDLRNAARILFSDDTLAPNNDETEERLRDKHPSAIRTSLTLNPCTPSDSTFQVKIEDTLDAIMSFPNGSAGGIDGITPQHLKDLVSVSVGDVGRTLLCDITKFCNFLFVGTISDSFKPFLFGARLCAFNKKDGGIRPIAVGCTFRRLASKLVCRNISQNLKSLFQPTQLGFGSRGGCEAAVHSVRTFLSHDSEADVLLKVDVKNAFNCIDRSTLLNEASIHTPGAYNYIRQCYSSHSKLFYNDKQISSEVGVQQGDPLGPALFSLGIHPIISNLNSKLNVWYLDDGTLGGKADTVKNDFINIINNFRNLNLDLNLGKCELYISDKFNPCDRKILIQNFQEISPEIKILQMDSLYLLGAPLLEESVRPLLEEKSRILSEHVNRLGTLNSHIAYTILKYCLFVPKFTYILRACPIWKHTDILENLDATLKNALEKILNLNLEDNSWTQATLPISSGGIGIRKISSVALPAFLSSVHSVTNLCSQILNTPTLELHCASDAIEAWKTLCPNENFPKEPTSQKLWDVPLVQRVHKNLVQNSFSDQHRARLLAVSTFESGQWLHALPSVNLGTLFDNGSFRIAVGLRLGAAIVERHRCSCGSDVDKNGLHGLYCQRSAGRFSRHGSINDIIKRTLATINVPSLLEPLGMVRDDGKRPDGLTLIPWERGRALVWDATCVDTLAPSHLSGSVLRAGAAAEAAEEAKRRKYVTLSSDYIFVPLGFETFGPWGPSTIKFFKQLFPRLVDAAGDRRAGSFLAQRIAIAIQRGNAASVLGTMPHGHPLLLDF

SEQ ID NO: 33121 - protein, 894 aa, Agriopis aurantiaria
MSTNSDIPFEQLLSNLNSKVRVVKRIPRGARLSLAKSLSIAINKCIDHQHHSSESWQELLTFAYRHFHAPFNNKKSLTAVLKSNCNANNCNFNFDISRTPAKPHNIYKIVENKAMDGDLRNAARILFSDDTLAPNNAQTLDALRDKHPSANSTSLLPNPPTPNLSALEIKIEDTLDAIMSFPNGSAGGIDGITPQHLKDLTSVSVGDVGRTLANDITKFCNFLFDGSISDTFKPFLFGARLCAFNKKDGGVRPIAIGCTFRRLASKLACRKISPKLTPLFQPIQLGFGSRGGCEAAVHSVRTFLSTDGEADVLLKVDVKNAFNCINRSTLLNEVYIHTPEVYNYIWQCYSSQSKLFYYDKQLSSEAGVQQGDPLGPALFGLGIHPIISNLNSKLNVWYLDDGTLGGKVDTVKNDFTRIINNFGKINLELNLGKCELFVSSKFNDHDREVIIQSFRDIAPEIKILEKNSLYLLGAPLFEDSVGPLLEKKSNILSVNINRLGFLNSHIAYTILKYCLFVPNFTYILRACPIWKHTQFLESLDATLKTSLEKILNLILENNSWIQASLPIRSGGIGIRKISSVALPAFLSSVHSVSKLCSSILKTSSVRIHCAADAIEAWKTVCPNGDIPKEPKRQKLWDAPLVQKVQQDLTQNSFSDQDRARLLAVFEHESGQWLHALPSANLGTLFDNGSFRIAIGLRLGAAIVERHLCPCGSGVDKNGLHGLYCQRSAGRFSRHGSINDIIKRALATINIPAVLEPVGIVRDDGKRPDGLTLIPWERGRALVWDATCVDTLAPSHLRGTIQKAGAAAEAAEDAKRRKYASLSSEYIFVPLGVETFGPWGPCTKKFLKKISPHLIDAAGDKRAGSFLAQRISLAIQRGNAASVLGTLPHGQHLFF

SEQ ID NO: 33122 - protein, 1062 aa, Cosmia trapezina
MQSSLLSPSRDEYLTPIGSDEDTPSPRPPPLPQPVQCCRRPQFNITRVGSDDEDVPSPRLPPLPQPVQCCRRPQFNITTVGSDDEDVPSPRLPPLPQLVQRSRQPESSILNMNVDPCVFLTCEQCSDGRQFKGRRGLNIHIGKTHKNVPLSSHNPNPSTSQSTDLLVSATSNIHFDKHLSDLNSKVPIVKRIPRGARVSLARALSAAINNCIQNQSNNTESWQELLTFSYRHFHAPSNSNKSLTSLLKSNCTTSNFQNHTDVTHIPKKTYNINKIVESKAMDGDLRNAARILFSDDTLAPNNDETEERLRDKHPSAIRTSLTLNPCTPSDSTFQVKIEDTLDAIMSFPNGSAGGIDGITPQHLKDLVSVSVGDVGRTLLCDITKFCNFLFVGTISDSFKPFLFGARLCAFNKKDGGIRPIAVGCTFRRLASKLVCRNISQNLKSLFQPTQLGFGSRGGCEAAVHSVRTFLSHDSEADVLLKVDVKNAFNCIDRSTLLNEASIHTPGAYNYIRQCYSSHSKLFYNDKQISSEVGVQQGDPLGPALFSLGIHPIISNLNSKLNVWYLDDGTLGGKADTVKNDFINIINNFRNLNLDLNLGKCELYISDKFNPCDRKILIQNFQEISPEIKILQIDSLYLLGAPLLEESVRPLLEEKSRILSEHVNRLGTLNSHIAYTILKYCLFVPKFTYILRACPIWKHTDILENLDATLKNALEKILNLNLEDNSWTQATLPISSGGIGIRKISSVALPAFLSSVHSVTNLCSQILNTPTLELHCASDAIEAWKTLCPNENFPKEPTSQELWDVPLVQRVHKNLVQNSFSDQHRARLLAVSTFESGQWLHALPSVNLGTLFDNGSFRIAVGLRLGAAIVERHRCSCGSDVDKNGLHGLYCQRSAGRFSRHGSINDIIKRTLATINVPSLLEPLGMVRDDGKRPDGLTLIPWERGRALVWDATCVDTLAPSHLSGSVLRAGAAAEAAEEAKRRKYVTLSSDYIFVPLGFETFGPWGPSTIKFFKQLFPRLVDAAGDRRAGSFLAQRIAIAIQRGNAASVLGTMPHGHPLLLDF

SEQ ID NO: 33123 - protein, 894 aa, Agriopis aurantiaria
MSTNSDIPFEQLLSNLNSKVRVVKRIPRGARLSLAKSLSIAINKCIDHQHHSSESWQELLTFAYRHFHAPSNNKKSLTAVLKSNCNANNCNFNFDISRTPAKPHNIYKIVENKAMDGDLRNAARILFSDDTLAPNNAQTLDALRDKHPSANSTSLLPNPPTPNLSALEIKIEDTLDAIMSFPNGSAGGIDGITPQHLKDLTSVSVGDVGRTLANDITKFCNFLFDGSISDTFKPFLFGARLCAFNKKDGGVRPIAIGCTFRRLASKLACRKISPKLTPLFQPIQLGFGSRGGCEAAVHSVRTFLSTDGEADVLLKVDVKNAFNCINRSTLLNEVYIHTPEVYNYIWQCYSSQSKLFYYDKQLSSEAGVQQGDPLGPALFGLGIHPIISNLNSKLNVWYLDDGTLGGKVDTVKNDFTRIINNFGKINLELNLGKCELFVSSKFNDHDREVIIQSFRDIAPEIKILEKNSLYLLGAPLFEDSVGPLLEKKSNILSVNINRLGFLNSHIAYTILKYCLFVPNFTYILRACPIWKHTQFLESLDATLKTSLEKILNLILENNSWIQASLPIRSGGIGIRKISSVALPAFLSSVHSVSKLCSSILKTSSVRIHCAADAIEAWKTVCPNGDIPKEPKRQKLWDAPLVQKVQQDLTQNSFSDQDRARLLAVFEHESGQWLHALPSANLGTLFDNGSFRIAIGLRLGAAIVERHLCPCGSGVDKNGLHGLYCQRSAGRFSRHGSINDIIKRALATINIPAVLEPVGIVRDDGKRPDGLTLIPWERGRALVWDATCVDTLAPSHLRGTIQKAGAAAEAAEDAKRRKYASLSSEYIFVPLGVETFGPWGPCTKKFLKKISPHLIDAAGDKRAGSFLAQRISLAIQRGNAASVLGTLPHGQHLFF

SEQ ID NO: 33124 - protein, 1027 aa, Hylaea fasciaria
MQSPLLSPSRDEYLTPAGSDEDAPSPRSPPPPQSVRRCRRPFYNITPDGSDDEDVPSSRSPPLPVQRGRRPESPVFYTNVGPSGLLTCNQCSDGRQFKGRRGLNIHIGKTHRNLSSSQNINLSSSQSPDLLSSAIPDIPFDKYLSELNSKVPIVKRIPRGARVSLAKSLSAAINNCIENQSKNSKSWQELLTFTYRHFHAPSNSNKSLTSILKSNCSTNHIPNPVDVIHVPSKKYNLNKIVESKAMDGDLRNAARILFSDDTLAPNNDETLESLRAKHPCANPTSFSLNPFPPSDSTLQVKIEDTLDAIMSFPNGSAGGIDGLTPQHLKDLVSVSAGDVGRALLSDITKFCNFLFVGRISDSFKPFLFGARLCAFNKKDGGIRPIAVGCTLRRLASKLICRHISPKLKDLFQPNQLGFGSRGGCEAAVHSVRTFLSRDSEADVLLKVDVKNAFNCIDRSSLLNEVSTHIPNTLNYIGQCYSSPSKLFYNNKQISSEVGVQQGDPLGPALFSLGIHPITSNLNSKLNVWYLDDGTLGGKADTVKNDFITVINNFRNLNLELNLGKCELYISEKFNSTDRKVLIQNFQEISPDIKILQMDSLYLLGAPLLEESVRPLLEKKSKILSENADRLGSLNSHIAYTILKYCLFVPNFTYILRACPIWKHTDILDKLDATLKNALEKILNLNLEDNSWTQATLPIRSGGIGIRKISSIALPAFLSSLHSVSSLCAQILKTPAPVLHCAADAVEAWRTLCPSENFPKEPTSQTLWDVSLVQRTHNYLVQNSSSGQERARFLAVSQHESGQWLHALPSANLGTLLDNGSFRIAVGLRLGAAIVESHRCPCGSVVDRNGLHGLFCQRSAGRFSRHGSINDIIKRALATINVPSTLEPVGMVRDDGKRPDGLTLIPWERGRALVWDATCVDTLAPSRLSGSVLKAGAAAEAAEEAKRRKYVTLSSDYIFVPLGFETFGPWGPSSKKFFNNLFPRLVDAAGDKRAGSYLAQRIAIAIQRGNAASVLGTMPHGHPLLLDL

SEQ ID NO: 33125 - protein, 970 aa, Nascus phocus
MCSQLPVLPTQGCRQPQDSALHFCTQPCIFLKCNLCSDGRQYKGRRGLKIHFAKIHKNTCSSTQALDFAPSTSTFQNSNIPFDEYLSNLNLNVRIIRRIPKGARVSLARSLSAAINNCISNQYNNPDSWQQLMTFAYTHFHAPPNNSKSLTSILKSNCISGQPHCPIDVPKNRKKPYSLFKIVESKAMDGDLRNAARILFSNDTLASSNDATVEALREKHPKVNPTSSPPDSPSSINSAFEVKIEDTWNAIMSFPSGSAGGIDGITPQHLKDLVSASAGDAGRTLLTDITKFCNFLYTGTISDIFKTFLFGARLCAFNKKDGGIRPIAVGCTLRRLASKLVCKNISSKLKPLFQPTQLGFGSRGGCEAAVHSVRTFLSNDTEADVLLKVDLKNAFNSIDRSTLLKEAYTHIPDVYNYIWQCYSSPTKLFYGDKQISSEVGVQQGDPLGPALFSLGIHSIISNLNSKLNVWYLDDGTLGGKVDSVKTDLTGIINNFRKINLELNLGKCELFVSNKFNNDDRISIIQNFKNYAPEIKILDKDSLYLLGAPLFDESVKPLLDTKSQILTENVNKLAFINSHIAYTILKHCLFVPKFTYVLRACPVWKHKELLDSLDATLKNTLEKILNIKLDKNSWTQASLPIRHGGIGIRKISSVALPAFLSSVHSVSNLCSLILKTPLDKINCAADAVEAWGTLCPGGTIPKEPNRQKLWDAPLVQGVHQDLIQNSFSAQDHARLLAVSEPESGQWLNALPSANLGTLFDNGSFRVAVGLRLGAAIVERHLCLCGGIVDRTGLHGLSCQRSAGRFSRHGSINNIFKRALATIDIPSVLEPVGIARDDGKRPDGLTLVPWERGRALVWDATCVDTLAPSRLRGMVSRAGAAAETAEEAKRRKYVSLSGDYMFVPLGFETFGPWGPSTKNFFKQLVPRLIDAAGDKRAGSYFAQRIAIAIQRGNAASVLGTMSHGHGLPLDFI

SEQ ID NO: 33126 - protein, 1027 aa, Hylaea fasciaria
MQSPLLSPSRDEYLTPAGSDEDAPSPRSPPPPQSVRRCRRPLYNITPDGSDDEDVPSSRSPPLPVQRGRRPESPVFYTNVGPSGLLTCNQCSDGRQFKGCRGLNIHIGKTHRNLPSSQNINLSSSQSPDLLSSAIPDMPFDKYLSELNSKVPIVKRIPRGARVSLAKSLSAAINNCIENQSKNSKFWQELLTFTYRHFHAPSNTNKSLTSILKSNCSTNHMPNPVDIIHVPSKKYNLYKIVENKAMDGDLRNAARILFSDDTLAPNNDETLESLRAKHPCANPTSFSLNPSPPSDSTLQVKIEDTLDAIMSFPNGSAGGIDGLTPQHLKDLVSVSAGDVGRALLSDITKFCNFLFVGRISDSFKPFLFGARLCAFNKKDGGIRTIAVGCTLRRLASKLICRHISPKLKDLFQPNQLGFGSRGGCEAAVHSVRTFLSRDSEADVLLKVDVKNAFNCIDRSSLLNEVSTHIPNTFNYIWQCYSSPSKLFYNNKQISSEVGVQQGDPLGPALFSLGIHPITSNLNSKLNVWYLDDGTLGGKADTVKNDFITVINNFRNLNLELNLGKCELYISDKFNSTDRKVLIQNFQEISSDIKILQMDSLYLLGAPLLEESVRPLLEKKSRILSENADRLGSLNSHIAYTILKYCLFVPNFTYILRACPIWKHTDILDNLDATLKNALEKILNLNLEDNSWTQAALPIRFGGIGIRKISSIALPAFLSSLHSVSSLCAQILKTPAPVLHCAADAVEAWRTLCPSENFPKEPTSQTLWDVSLVQRTHNYLVQNSSSDQDRARFLAVSQHESGQWLHALPSANLGTLLDNGSFRIAVGLRLGAAIVESHRCPCGSVVDRNGLHGLFCQRSAGRFSRHGSINDIIKRALATINVPSTLEPVGMVRDDGKRPDGLTLIPWERGRALVWDATCVDTLAPSRLSGSVLKAGAAAEAAEEAKRRKYVTLSSDYIFVPLGFETFGPWGPNSKKFFKNLFPRLVDAAGDKRAGSYLAQRIAIAIQRGNAASVLGTMPHGHPLLLDL

SEQ ID NO: 33127 - protein, 1009 aa, Agriopis aurantiaria
MDSSREEYSTPIGSDEEFDPGPPPPPQSVRRCRRPPDNPPRLSSSPLPQPAERPEVIFSLTANSQCNNNYFQCNQCSDGRQFKGRRGLNIHIAKIHNQIPFSDQITISRHACSTPMSTNSDIPFEQLLSNLNSKVRVVKRIPRGARLSLAKSLSIAINKCIDHQHHSSESWQELLTFAYRHFHAPSNNKKSLTAVLKSNCNANNCNFNFDISRTPAKPHNIYKIVENKAMDGDLRNAARILFSDDTLAPNNAQTLDALRDKHPSANSTSLLPNPPTPNLSALEIKIEDTLDAIMSFPNGSAGGIDGITPQHLKDLTSVSVGDVGRTLANDITKFCNFLFDGSISDTFKPFLFGARLCAFNKKDGGVRPIAIGCTFRRLASKLACRKISPKLTPLFQPIQLGFGSRGGCEAAVHSVRTFLSTDGEADVLLKVDVKNAFNCINRSTLLNEVYIHTPEVYNYIWQCYSSQSKLFYYDKQLSSEAGVQQGDPLGPALFGLGIHPIISNLNSKLNVWYLDDGTLGGKVDTVKNDFTRIINNFGKINLELNLGKCELFVSSKFNDHDREVIIQSFRDIAPEIKILEKNSLYLLGAPLFEDSVGPLLEKKSNILSVNINRLGFLNSHIAYTILKYCLFVPNFTYILRACPIWKHTQFLESLDATLKTSLEKILNLILENNSWIQASLPIRSGGIGIRKISSVALPAFLSSVHSVSKLCSSILKTSSVRIHCAADAIEAWKTVCPNGDIPKEPKRQKLWDAPLVQKVQQDLTQNSFSDQDRARLLAVFEHESGQWLHALPSANLGTLFDNGSFRIAIGLRLGAAIVERHLCPCGSGVDKNGLHGLYCQRSAGRFSRHGSINDIIKRALATINIPAVLEPVGIVRDDGKRPDGLTLIPWERGRALVWDATCVDTLAPSHLRGTIQKAGAAAEAAEDAKRRKYASLSSEYIFVPLGVETFGPWGPCTKKFLKKISPHLIDAAGDKRAGSFLAQRISLAIQRGNAASVLGTLPHGQHLFF

SEQ ID NO: 33128 - protein, 1062 aa, Cosmia trapezina
MQSSLLSPSRDEYLTPIGSDEDTPSPRPPPLPQPVQCCRRPQFNITRVGSDDEDVPSPRLPPLPQPVQCCRRPQFNITTVGSDDEDVPSPRLPPLPQLVQRSRQPESSILNMNVDPCVFLTCEQCSDGRQFKGRRGLNIHIGKTHKNVPLSSHNPNPSTSQSTDLLVSATSNIHFDKHLSDLNSKVPIVKRIPRGARVSLARALSAAINNCIQNQSNNTESWQELLTFSYRHFHAPSNSNKSLTSLLKSNCTTSNFQNHTDVTHIPKKTYNINKIVESKAMDGDLRNAARILFSDDTLAPNNDETEERLRDKHPSAIRTSLTLNPCTPSDSTFQVKIEDTLDAIMSFPNGSAGGIDGITPQHLKDLVSVSVGDVGRTLLCDITKFCNFLFVGTISDSFKPFLFGARLCAFNKKDGGIRPIAVGCTFRRLASKLVCRNISQNLKSLFQPTQLGFGSRGGCEAAVHSVRTFLSHDSEADVLLKVDVKNAFNCIDRSTLLNEASIHTPGAYNYIRQCYSSHSKLFYNDKQISSEVGVQQGDPLGPALFSLGIHPIISNLNSKLNVWYLDDGTLGGKADTVKNDFINIINNFRNLNLDLNLGKCELYISDKFNPCDRKILIQNFQEISPEIKILQMDSLYLLGAPLLEESVRPLLEEKSRILSEHVNRLGTLNSHIAYTILKYCLFVPKFTYILRACPIWKHTDILENLDATLKNALEKILNLNLEDNSWTQATLPISSGGIGIRKISSVALPAFLSSVHSVTNLCSQILNTPTLKLHCASDAIEAWKTLCPNENFPKEPTSQKLWDVPLVQRVHKNLVQNSFSDQHRARLLAVSTFESGQWLHALPSVNLGTLFDNGSFRIAVGLRLGAAIVERHRCSCGSDVDKNGLHGLYCQRSAGRFSRHGSINDIIKRTLATINVPSLLEPLGMVRDDGKRPDGLTLIPWERGRALVWDATCVDTLAPSHLSGSVLRAGAAAEAAEEAKRRKYVTLSSDYIFVPLGFETFGPWGPSTIKFFKQLFPRLVDAAGDRRAGSFLAQRIAIAIQRGNAASVLGTMPHGHPLLLDF

SEQ ID NO: 33129 - protein, 1192 aa, Coremacera marginata
MENTTQSNNMGTSDNPTASGSHSNSRAPGLVPGSSATNESQNIQNHRTNSQFRNDEHAPTDAALTAAGTLRQRRKWTPNINESLLRYYYTATENETNMTAYRTRLHTTFTNAHPDYNVSEQRLADQVRAIHRNNLVPEAIRTQIRDQIQPTNVINPQDVPQREESVSPTHDSAENEQPNVDINESVPPNIGIESQTSETFWELFSLFDKTNPALRPPIARINTSRKACQILKYLNDEIIPRFIRDVHGLEELQTIVYCAAQTTATLLGKAPKHQPQWQKKKINEAKPWLRRLEGGMKKLQSQISSLNEYLKGNKSRRLKRNVNKICQAYRNHSRYESNERVPQRVIDTLKQKLSVMKTKRQKYMVSEKRKMNNMRFYKNEKCFYRSLKTKPFENEESEQDLPAQQDTEKYWSSIWSKSVQHNSSAYWITSETERTARLTPMSNHLITIDNLIAVLSKTQNWKAPGNDKIQNFWYKRLTSTHEKLIHLFNINIENPSDFPNFLTEGVTYLLPKSTLFNGDPAKGRPITCLPTMYKIITACINNSICKHLTEHGIITEEQKGCIRGARGCKEQLTIDQIILEQATKGSRNLYVGYIDYQKAFDSIPHSWLVEILSIYKINPIIINFLEKIMKKWKTTIEVKGESAQYRTGTIPIKRGIFQGDCLSALWFCIALNPLSNLLKETRYGFKIKKDGDPIHQINHLLYMDDLKLYASTKTHLNHLLSITESFSNDIKMSFGIDKCKTLDIIRGKISANPEPSACGIGELTQDDVYKYLGVMQSRRIEQKAVKDKLKNEVFGRIHKLAKSHLNGKNLFKAINAYAVPVLTYSFGIIGWTITELNNIQRKIRTTLTKYRVHHPKSCLERMTLPRKHGGRGLIDVKLLHENQLKSLRSYFHEKRDESNLIRAITSVDAEYTPLKLQEAIMEVRAESNNQKMDSWASKTLHGRYYHSLAKQNVDQKLSNKWLTDGNIYSETEGLMFAIQDEVLPTRNYMIYIVKQPDAHEDTCRRCSTRGETIDHIISGCSTLAQSDYLKRHNNVAKIIHIELLKANNMTTEHFRYYLYEPEPVIETESVKLYFDRTLYTIHRREHNRPDITFINKRSREGFLIDISVPLSRNMERTYLDKINKYAELATEIKTQWHLKSVKIIPIIISSVGIVNKNLTSSVKSLNLNESIIQSIQKSVIIDTCHVVRKFLQ

SEQ ID NO: 33130 - protein, 897 aa, Coremacera marginata
MKKLQSQISSLNEYLKGDKSRRLKRNVNKICQPYRNHSRYESNERVPQRVIDTLKQKLSVMKTKRQKYMVSEKRKMNNMRFYKNEKCFYRSLKTKPFENEESEQDLPAQQDTEKYWSSIWSKSVQHNSSAYWITSETERTARLTPMRNHLITIDNLIAVLSKTQNWKAPGNDKIQNFWYKRLTSTHEKLTHLFNINIENPSDFPNFLTEGVTYLLPKSTLFNGDPAKGRPITCLPTMYKIITACINNSICKHLTEHGIITEEQKGCIRGARGCKEQLTIDQIILEQATKGSRNLYVGYIDYQKAFDSIPHSWLVEILSIYRINPIIINFLEKIMKKWKTTIEVKGESAQYRTGTIPIKRGIFQGNCLSALWFCIALNPLSNLLKETRYGFKIKKDGDPIHQINHLLYMDDLKLYASTKIHLNHLLSITESFSNDIKMSFGIDKCKTLDIIRGKISANPEPSACGIGELTQDDVYKYLGVMQSRRIEQKAVKDKLKNEVFGRIHKLAKSHLNGKNLFKAINAYAVPVLTYSFGIIGWTITELNNIQRKIRTTLTKYRVHHPESCLERMTLPRKHGGRGLIDVKLLHENQLKSLRSYFHEKRDESNLIREITSVDAEYTPLKLQEAIMEVRAESNNQTMDSWASKTLHGRYYHSLTKQNVDQKLSNKWLTDGNIYSETEGLMFAIQDEVLPTRNYMKYIVKQPDAHEDTCRRCSTRGETIDHIISGCSTLAQSDYLKRHNNVAKIIHIELLKANNMTTEHFRYYLYEPEPVIETESVKLYFDRTLYTIHRREHNRPDITFINKRSREGFLIDISVPLSRNMERTYLDKINKYAELATEIKTQWHLKSVKIIPIIISSVGIVNKNLTSSVKSLNLNESIIQSIQKSVIIDTCHVVRKILQ

SEQ ID NO: 33131 - protein, 874 aa, Mellicta athalia
MGVPDDSTEVPPVSEAAAETGEAPLSPEAVQALETLLERAERRKRWQRGGAESAKRRRRKFRTVNDIAPGSITNRKRRRIEYARVQELFRKCPSRGAAEVIEGHARVIRHGLEDLETYWRPVLEAVSDAPGPTQKALNALRRGEVVDYTGLWAPFTVEEVAASRVDSWTAPGPDGIRSEEWRAVPAQLKAEIFSNWLAKGAIPEPLRQCRTIFVPKTNDPAGPSDYRPISVASVPLRHLHSILAKRLLRCCPLDTRQRGFVSADGALENIAVLDAVLGDSRRKLKECHVAVLDFAKAFDTVSHGALLELLEARGLPKGFINYVAHMYETAHTILAVNGKTSQPVKVGRGVRQGDPLSPVLFNVAMDLILASLPKGVGYGLEGEKIAALAYADDLILVAGSKVGMQESIDRVVEAGEMMGLKVNAGKSSVLSMVPDGKRKKHHYPTDRVFTVGRSKLRQVSSVERWRYLGIDFESAGTAMLELKVRKALENITRAPLKPQQRLEIVRGHLIPRFIYGLVLGKISDDRLRMLDIEIRGAVRKWLRLPIDVPKGYYHAEAKDGGLAIPSLRAVIPGLILRRYGGLVSSGWSAARAAARSDRIKKKLSWARKQVRKFTNDQEISVSQYWRELLYASTDGHELRESYRNPASTKWVRERCMQYSGRDYVQFVHCHINALPSRVRASRGRRSGRESELNCRAGCMVRETTAHVIQQCFRTHGGRVKRHDCVTRFIAEAMTKKGWEVIMEPRFATSIGCRKPDIIASRDGVGVIVDAQVVSGQRPLDDAHREKRRKYGNHAELVQLVAERLGLPCKESVRTTSCTISWRGVWSGASINEMQKLVGLNKAVFELLPGIVLRGSHTNWTRFNQMTAVSAAMSD

SEQ ID NO: 33132 - protein, 1085 aa, Mellicta athalia
MGGLRVHSSWSPSSLAVSLRLGPCENRGRARWSGLRPGHIRDDTVAMEPNNKNLGRPDLPQESGSTVNPSPVARPDTPDESVGRVPEWTCPVCDRTFDTKTGLGVHLRSAHPVEANADAAPPQLKRRWREEELSLLARTEAQLTVDKGKCSNVDLLAKLPQLQRTLEAIKGQRRGAKYRELVKAYLEEIASSSSGPASGGSISDQLPETQPMGVPDDSTEVPPVSEAAAETGEAPLSPEAVQALETLLERAERRKRWQRGGAESAKRRRRKFRTVNDIAPGSITNRKRRRIEYARVQELFRKCPSRGAAEVIEGHARVIRHGLEDLETYWRPVLEAVSDAPGPTQKALNALRRGEVVDYTGLWAPFTVEEVAASRVDSWTAPGPDGIRSEEWRAVPAQSKAEIFSNWLAKGAIPEPLRQCRTIFVPKTNDPAGPSDYRPISVASVPLRHMHSILAKRLLRCCPLDTRQRGFVSADGALENIAVLDAVLGDSRRKLKECHVAVLDFAKAFDTVSHGALLELLEARGLPKGFISYVAHMYETAHTILAVNGKTSQPVKVGRGMRQGDPLSPVLFNVAMDLILASLPKGVGYGLEGEKIAALAYADDLILVAGSKVGMQESIDRVVEAGEMMGLKVNAGKSSVLSMVPDGKRKKHHYPTDRVFTVGRSKLRQVSSVERWRYLGIDFESAGTAMLELKVRKALENITRAPLKPQQRLEIVRGHLIPRFIYGLVLGKISDDRLRMLDIEIRGAVRKWLRLPIDVPKGYYHAEAKDGGLAIPSLRAVIPGLILRRYGGLVSSGWSAARAAARSDRIKKKLSWARKQVRKFTNDQEISVSQYWRELLYASTDGHELRESYRNPASTKWVRERCMQYSGRDYVQFVHCHINALPSRVRASRGRRSGRESELNCRAGCMVRETTAHVIQQCFRTHGGRVKRHDCVTRFIAEAMTKKGWEVIMEPSFATSIGCRKPDIIASRDGVGVIVDAQVVSGQRPLDDAHREKRRKYGNHAELVQLVAERLGLPCKESVRTTSCTISWRGVWSGASINEMQKLVGLNKAVFELLPGIVLRGSHTNWTRFNQMTAVSAAMSD

SEQ ID NO: 33133 - protein, 1077 aa, Nymphalis io
MGDLTVAKSPNKKILGRPDLPQESGSTVSSSPVVRSGVPGGNAGRPLGWTCPMCGRSFGTKTGLGVHKRRAHPVEANAEAAPALVKRRWSEEELLLMARVEAQLTRETGKCPNADLLAKLPQLRRTLEAVKGQRRSAKYKGLVKTCLEELALSEVEPNARRGSRTERTPEVLPTRESESASEDPPDDEPRRTAQTPVSSNAAQVLEDLLREIERRKRRCEPGAKARRRLRRKNNGFDYPSASDFRSSRRRRRAEYAQMQELFRKCPSRAAAEVIDGHTRAVRHSLGELETYWRPILEAVSSAPGPSKEALKAFGKGLPYGGVNDYAKLWAPVTIDEVKASRIDMRTAPGPDGIRAEDWRAIPASSKAEMFNEWMIQGSIPESLRQCRAIFIPKSDAPKGPGDYRPISIASVPLRHLHSILARRLLACCPPDGRQRGFVSADGTLENTAVLDAVLGDSRKKLRECHVAVLDFSKAFDTVSHAALVELLRARGLPDGFCRYMATMYETASTTLAVGNERSHPVKVGRGVRQGDPLSPILFNMAMDLVLASLPKGIGYRLENEQISALAYADDLVLLAGSKVGMQEAIDRVVQVGEMVGLGINIGKSSVLSMVPDGKRKKHHYLTERVFSVGKKKLRQVSCVERWRYLGIDFESSGASMLEQEVRKALDNISKAPLKPQQRLEVVRGHLIPRFMHGLVLGTISDDRLRMLDIEIRGAVRKWLRLPHDVPKAYFHADVKAGGLAIPSLRTVVPNLILRRYGRLASSRWSAANAAARSERIRRKLSWAKKQLSKLTRENPKTHLTSVEQYWRESLYASTDGLELRESFRNPASTKWIRERCMQYSGRDYVQFVHCHINALPSRVRASRGRRCMGESTLNCRAGCMLRETTAHTIQQCFRTHGGRIERHNCITNVIAEALTKKGWTVVVEPRFMTSVGCRKPDIIAARNGAGVIVDTQIVSGQRPLDDAHRAKRSKYGKHAELVQLVADKLGLSGAESVCATSCTVSWRGVWSGASAREMRELLGLNKVLCCLLGFYRTHAVPDPQSYRIGRTLRRSPPQHQLRTASNTNLYNAATAAVTRRE

SEQ ID NO: 33134 - protein, 1003 aa, Nymphalis io
MCGRSFGTKTGLGVHKRRAHPVEANAEAAPALVKRRWSEEELLLMARVEAQLTRETGKCPNADLLAKLPQLRRTLEAVKGQRRSAKYKGLVKTCLEELALSEVEPNARRGSRTERTPEVLPTREPESASEDPPDDEPRRTAQTPVSSNAAQVLEDLLREIERRKRRCEPGAKARRRLRRKNNGFDYPSASDFRSSRRRRRAEYARMQELFRKCPSRAAAEVIDGHTRAVRHSLGELETYWRPILEAVSSAPGPSKEALKAFGKGLPYGGVNDYAKLWAPVTIDEVKASRIDMRTAPGPDGIRAEDWRAIPASSKAEMFNEWMIQGSIPESLRQCRAIFIPKSDAPKGPGDYRPISIASVPLRHLHSILARRLLACCPPDGRQRGFVSADGTLENTAVLDAVLGDSRKKLRECHVAVLDFSKAFDTVSHAALVELLRARGLPDGFCRYMATMYETASTTLAVGNERSHPVKVGRGVRQGDPLSPILFNMAMDLVLASLPKGIGYRLENEQISALAYADDLVLLAGSKVGMQEAIDRVVQVGEMVGLGINIGKSSVLSMVPDGKRKKHHYLTERVFSVGKKKLRQVSCVERWRYLGIDFESSGASMLEQEVRKALDNISKAPLKPQQRLEVVRGHLIPRFMHGLVLGTISDDRLRMLDIEIRGAVRKWLRLPHDVPKAYFHADVKAGGLAIPSLRTVVPNLILRRYGRLASSRWSAANAAARSERIRRKLSWAKKQLSKLTRENPKTHLTSVEQYWRESLYASTDGLELRESFRNPASTKWIRERCMQYSGRDYVQFVHCHINALPSRVRVSRGRRCMGESTLNCRAGCMLRETTAHTIQQCFRTHGGRIERHNCITSVIAEALTKKGWTVVVEPRFVTSVGCRKPDIIAARNGAGVIVDTQIVSGQRPLDDAHRAKRSKYGKHAELVQLVADKLGLSGAESVCATSCTVSWRGVWSGASAREMRELLGLNKSIFEQIPGLVLRGSHMNWTRFNQMTAVSTVTPD

SEQ ID NO: 33135 - protein, 1055 aa, Nymphalis io
MGDLTVAKSPNKKILGRPDLPQESGSTVSSSPVVRSGVPGGNAGRPLGWTCPMCGRSFGTKTGLGVHKRRAHPVEANAEAAPALVKRRWSEEELLLMARVEAQLTRETGKCPNADLLAKLPQLRRTLEAVKGQRRSAKYKGLVKTCLEELALSEVEPNARRGSRTERTPEVLPTREPESASEDPPDDEPRRTAQTPVSSNAAQVLEDLLREIERRKRRCEPGAKARRRLRRKNNGFDYPSASDFRSSRRRRRAEYARMQELFRKCPSRAATEVIDGHTRAVRHSLGELETYWRPILEAVSSAPGPSKEALKAFGKGLPYGGVNDYAKLWAPVTIDEVKASRIDMRTAPGPDGIRAEDWRAIPASSKAEMFNEWMIQGSIPESLRQCRAIFIPKSDAPKGPGDYRPISIASVPLRHLHSILARRLLACCPPDGRQRGFVSADGTLENTAVLDAVLGDSRKKLRECHVAVLDFSKAFDTVSHAALVELLRARGLPDGFCRYMATMYETASTTLAVGNERSQPVKVGRGVRQGDPLSPILFNMAMDLVLASLPKGIGYRLENEQISALAYADDLVLLAGSKVGMQEAIDRVVQVGEMVGLGINIGKSSVLSMVPDGKRKKHHYLTERVFSVGKKKLRQVSCVERWRYLGIDFESSGASMLEQEVRKALDNISKAPLKPQQRLEVVRGHLIPRFMHGLVLGTISDDRLRMLDIEIRGAVRKWLRLPHDVPKAYFHADVKAGGLAIPSLRTVVPNLILRRYGRLASSRWSAANAAARSERIRRKLSWAKKQLSKLTRENPKTHLTSVEQYWRESLYASTDGLELRESFRNPASTKWIRERCMQYSGRDYVQFVHCHINALPSRVRASRGRRCMGESTLNCRAGCMLRETTAHTIQQCFRTHGGRIERHNCITSVIAEALTKKGWTVVVEPRFMTSVGCRKPDIIAARNGAGVIVDTQIVSGQRPLDDAHRAKRSKYGKHAELVQLVADKLGLSGAESVCATSCTVSWRGVWSGASAREMRELLGLNKSIFEQIPGLVLRGSHMNWTRFNQMTAVSTVTPD

SEQ ID NO: 33136 - protein, 1097 aa, Junonia vestina
MGGLNESNSDSTKSSGFLRLGPFEKPWAKPLAGFAARPTRICIVAKSPKKKNLGRPDLPQESGTTVLSSSAAQPDAPGGSEGRAPDWICPICGRIFGTKTGLGVHKRRAHPVEANAEAAPLQVKRRWSDEELLLLARTEAQLTAETGTCSNVDLLAKLPQLQRTLEAIKGQRRSVKYKGLVKASLEELALAAADLASRGSSAEQAPEALPTETQNAECSEVPSVADDPAAVETPDSNAVKVVENLLREAERRKQCRERGAEAAGRRRRKSQKKRILNTALDTLSRKRQRRIEYARVQELFRKCPSRAAAEVIDGHTRETKHSLEVLEAYWRPILEEVSDAPGPTQQALSALKRGASLYESQGGVDDYSRLWAPVTVDEVKASRIDYRSAPGPDGIRAEDWRAVPAASKAEIFNLWMARGDIPKPLRQCRTIFIPKVESPAGPSDYRPISIASIPLRHMHGILAKRLLACCPPDARQRGFVNADGTLENTAVLDAVLGDSRKKLRECHIAVLDFSKAFDTLSHGALLDLLRARGLPKGFCDYLARLYNTAHTILAVKETYSQPVKVGRGVRQGDPLSPILFNMAMDLILASLPKGVGYGLEGEKISALAYADDLVLLAGSKVGMQEAIDTVVQVGGTMGLLVNPKKSSVLSMVPDGKRKKHHYLTERVFSVGKRRLRQVDCVERWRYLGVDFESSGASLIELEVRKALDNITKAPLKPQQRLEIVRGHLIPRFMHGLVLGTISDDRLRMLDIEIRGAVRKWLRLPKDVPKGYYHADVKDGGLAIPSLRTVIPDLVLRRYGGLASSRWSAANAAARSDRIRKKLSWARKQVRKFTRDHPKTQVTSVSQYWREVLHASTDGYELRESARNPASTKWIRERCMQYSGRDYVQFVHCHINALPSRVRASRGRRHGRESELNCRAGCTLRETTAHTIQQCFRTHGGRIERHDCVTRIIAEAMSEQGWKVELEPRFTTSRGVRKPDLIAVRGGAGVILDTQIVSGQRPLDDAHRAKRSKYGSHEELVGLVADKLGLSDAACVRTTSCTISWRGVWSGASSKEMQEVIGLKKAIFEIIPGLVLRGSHMNWTRFNQMTAVSAASSD

SEQ ID NO: 33137 - protein, 959 aa, Nymphalis polychloros
MARVEAQLTQATGKCANADLLAKLPQLQRTLEAVKGQRRSVKYKGLVKTCLEELALSVAESNAGRGSITERTSEVQLSGMPEDSSEDPPVAEPRKVETLMSSSAVQVLEDLLREVERRKRCCEPGAKTRKRRRRNKIHGYDKQTASDSLSRRKRRRNEYARMQELFRKCPSRAAAEVINGHSRDVKHSLGELEAYWRPVLEAVSSAPGPSKEAIKALGQGPPHGGVEEYSRLWAPITIDEVKASRIDIRTAPGPDGVRAEDWRRIPASSKAEIFSSRLIQGSIPDSLRQCRTVFIPKSDAPKGPGDYRPISIASVPLRHLHSILAKRLLACCPPDMRQRGFVNADGTLENTAVLDAVLGDSRKKLRECHVAVLDFSKAFDTVSHAALIELLRARGLPDGFCDYMATMYETASTTLAVNNERSQPVKVGRGVRQGDPLSPILFNMAMDLILASLPKGVGYRLESEQISALAYADDLVLLAGSKVGMQESIDRVVQIGEMVGLNINQAKSSVLSMVPDGKRKKHHYLTERVFSIGKKKLRQVSCVERWRYLGVDFESSGASMLEQEVRKVLENISKAPLKPQQRLEIVRGHLIPRFLHGLVLGTISDDRLRMLDIEIRGAVRKWLRLPHDVPKAYFHADVKAGGLAIPSLRTVVPDLVLRRYGRLASSQWLAANAAARSERIRKKLSWAKRQLRKFTTENPKTHIRSVEQYWRESLHASTDGFELRESFRNPASTKWIRERCMQYTGRDFVQFVHCHINALPSRVRVSRGRRCMGESKLNCRAGCMLRETTAHTIQQCFRTHGGRIERHDCVTRFVAEAMTKDGWTVVVEPRFMTSIGCRKPDIIAVRDGAGVIVDTQIVSGQRPLDDAHRAKRSKYGTHAELVKLVADRLGLSGTECVRTTSCTVSWRGVWSGASPREMRELLGLKAHVFEIIPGLVLRGSHINWTRFNQMTTVSAASSD

SEQ ID NO: 33138 - protein, 959 aa, Nymphalis polychloros
MARVEAQLTQATGKCANADLLTKLPQLQRTLEAVKGQRRSVKYKGLVKTCLEELALSVAESNARRGSITERTSEVQLSGMPEDSSEDPPVAEPRKVETLMSSSAVQVLEDLLREVERRKRCCEPGAKTRNGRRRNKIHGYDKQTASDSLSRRKRRRNEYARMQELFRKCPSRAAAEVINGHSRDVMHSLGELEAYWRPVLEAVSSAPGPSKEALKALGQGPPHGGVEEYSRLWAPITIDEVKASRIDIRTAPGPDGVRAEDWRRIPASSKAEIFSSWLIQGSIPDSLRQCRTVFIPKSDAPKGPGDYRPISIASVPLRHLHSILAKRLLACCPPDMRQRGFVNADGTLENTAVLDAVLGDSRKKLRECHVAVLDFSKAFDTVSHAALIELLRARGLPDGFCDYMATMYETASTTLAVNNERSQPVKVGRGVRQGDPLSPILFNMAMDLILASLPKGDGYRLESEQISALAYADDLVLLAGSKVGMQESIDRVVQIGEMVGLNINQAKSSVLSMVPDGKRKKHHYLTERVFSIGKKKLRQVSCVERWRYLGVDFESSEASMLEQEVRKVLENISKAPLKPQQRLEIVRGHLIPRFLHGLVLGTISDDRLRMLDIEIRGAVRKWLRLPHDVPKAYFHADVKAGGLAIPSLRTVVPDLVLRRYGRLASSQWLAANAAARSERIRKKLSWAKRQLRKFTTENPKTHMRSVEQYWRESLHASTDGFELRESFRNPASTKWIRERCMQYTGRDFVQFVHCHINALPSRVRVSRGRRCMGESKLNCRAGCMLRETTAHTIQQCFRTHGGRIERHDCVTRFVAEAMTKDGWTVVVEPRFMTSIGCRKPDIIAVRDGAGVIVDTQIVSGQRPLDDAHRAKRSKYGTHAELVKLVADRLGLSGTECVRTTSCTVSWRGVWSGASAREMRELLGLKAHVFEIIPGLVLRGSHINWTRFNQMTAVSAASSD

SEQ ID NO: 33139 - protein, 959 aa, Nymphalis polychloros
MARVEAQLTQATGKCANADLLAKLPQLQRTLEAVKGQRRSVKYKGLVKTCLEELALSVAESNAGRGSITERTSEVQLSGMPEDSSEDPPVAEPRKVETLMSSSAVQVLEDLLREVERRKRCCESGAKTRKRRRRKKTHGFDKQTASDSLSRRKRRRNEYARMQELFRKCPSRAAAEVINGHSRDVKHSLGELEAYWRPVLEAVSSAPGPSKEALKALGQGPPHGGVEEYSRLWAPITIDEVKASRIDIRTAPGPDGVRAEDWRRIPASSKAEIFSSWLIQGSIPDSLRQCRTVFIPKSDAPKGPGDYRPISIASVPLRHLHSILAKRLLACCPPDMRQRGFVNADGTLENTAVLDAVLGDSRKKLRECHVAVLDFSKAFDTVSHAALIELLRARGLPDGFCDYMATMYETASTTLAVNDERSQPVKVGRGVRQGDPLSPILFNMAMDLILASLPKGVGYRLESEQISALAYADDLVLLAGSKVGMQESIDRVVQIGEMVGLNINQAKSSVLSMVPDGKRKKHHYLTERVFSIGKKKLRQVSCVERWRYLGVDFESSGASMLEQEVRKVLENISKAPLKPQQRLEIVRGHLIPRFLHGLVLGTISDDRLRMLDIEIRGAVRKWLRLPHDVPKAYFHAEVKAGGLAIPSLRTVVPDLVLRRYGRLASSQWLAANAAARSERIRKKLSWAKRQLRKFTTENPKTHMRSVEQYWRESLHASTDGFELRESFRNPASTKWIRERCMQYTGRDFVQFVHCHINALPSRVRVSRGRRCMGESKLNCRAGCMLRETTAHTIQQCFRTHGGRIERHDCVTRFVAEAMTKDGWTVVVEPRFMTSIGCRKPDIIAVRDGAGVIVDTQVVSGQRPLDDAHRAKRSKYGTHAELVKLVADRLGLSGTECVRTTSCTVSWRGVWSGASAREMRELLGLKAHVFEIIPGLVLRGSHINWTRFNQMTAVSAASSG

SEQ ID NO: 33140 - protein, 959 aa, Nymphalis polychloros
MARVEAQLTQATGKCANADLLAKLPQLQRTLEAVKGQRRSVKYKGLVKTCLEELALSVAESNAGRGSITERTSEVQLSGMPEDSSEDPPVAEPRKVETLMSSSAVQVLEDLLREVERRKRCCESGAKTRKRRRRKKTHGFDKQTASDSLSRRKRRRNEYARMQELFRKCPSRAAAEVINGHSRDVKHSLGELEAYWRPVLEAVSSAPGPSKEALKALGQGPPHGGVEEYSRLWAPITIDEVKASRIDIRTAPGPDGVRAEDWRRIPASSKAEIFSSWLIQGSIPDSLRQCRTVFIPKSDAPKGPGDYRPISIASVPLRHLHSILAKRLLACCPPDMRQRGFVNADGTLENTAVLDAVLGDSRKKLRECHVAVLDFSKAFDTVSHAALIELLRARGLPDGFCDYMATMYETASTTLAVNDERSQPVKVGRGVRQGDPLSPILFNMAMDLILASLPKGVGYRLESEQISALAYADDLVLLAGSKVGMQESIDRVVQIGEMVGLNINQAKSSVLSMVPDGKRKKHHYLTERVFSIGKKKLRQVSCVERWRYLGVDFESSGASMLEQEVRKVLENISKAPLKPQQRLEIVRGHLIPRFLHGLVLGTISDDRLRMLDIEIRGAVRKWLRLPHDVPKAYFHAEVKAGGLAIPSLRTVVPDLVLRRYGRLASSQWLAANAAARSERIRKKLSWAKRQLRKFTTENPKTHMRSVEQYWRESLHASTDGFELRESFRNPASTKWIRERCMQYTGRDFVQFVHCHINALPSRVRVSRGRRCMGESKLNCRAGCMLRETTAHTIQQCFRTHGGRIERHDCVTRFVAEAMTKDGWTVVVEPRFMTSIGCRKPDIIAVRDGAGVIVDTQVVSGQRPLDDAHRAKRSKYGTHAELVKLVADRLGLSGTECVRTTSCTVSWRGVWSGASAREMRELLGLKAHVFEIIPGLVLRGSHINWTRFNQMTAVSAASSD

SEQ ID NO: 33141 - protein, 1003 aa, Vanessa atalanta
MCNRTFNTKTGLGVHKRRAHPVEANAEAAPASVKRRWNEEELLLMARVEAQLTRDTGKCGNVDLLAKLPQLHRTLEAVKGQRRSVKYKGLVQTCLEELAFSAADSIARGGSSTEGALEARPSIVIGSNPEDPPVAEPCQTVETPIGPNAAHVLEDLLRAVERRKRRCEPGAKTRSRRRRKNYDCDIQAASDSMSRRKRRRVEYARMQELFRKCPSRAAAEVIDGHTRDARHGLEEMETFWRPILETVSSASGPTSEALKSLRRGLPSGGVDDYTKLWAPITIDEVKASSIDMRTAPGPDGIRAEDWRAIPASSKAEIFNHWMVQGSIPDPLRQCRTVFIPKSDAPKCPGDYRPISIASIPLRHMHSILAKRLLACCPPDMRQRGFVSADGTLENTAVLDAVLGDSRKKLRECHIAVLDFSKAFDTVSHAALVDLLRARGLPDGFCSYVANLYETASTVLAVKGKVGKPVKMGRGVRQGDPLSPILFNMALDLILASLPKGVGYRLENEQISALAYADDLVLLAGSKVGMQESIDRVVQVAEMVGLNINHGKSSALSMVPDGKRKKHHYLTERVFSVGRKKLRQVSCVERWRYLGVDFESSGALMLEQEVRKALDNISKAPLKPQQRLEIVRGHLIPRFMHGLVLGTISDDRLRMLDIEIRGAVRKWLRLPQDVPKAYFHAEIKAGGLAIPSLRTVVPDLVLRRYGRLDSSRWSAANAAARSDRIRKKLSWAKKLIGKFTKGNPKTQITSVDQYWRETLHASTDGFELRESYRNPASTKWIRERCMQYSGRDFVQFVHCHINALPSRVRVSRGRRCMGESKLNCRAGCMLRETTAHTIQQCFRTHGGRIERHDCITRFIAEALTKIGWTVVVEPRFMTSIGCRKPDLIAVRDGAGVIVDTQIVSGQRPLDDAHRAKRSKYGTHVELVQMVADRLGLSDSECVRSTSCTISWRGVWSGASAREMREILGLDKSWFEQIPGIVLRGSHTNWTRFNQMTAVSAATSG

SEQ ID NO: 33142 - protein, 1097 aa, Junonia vestina
MGGLNESNSDSTKSSGFLRLGPFEKPWAKPLAGFAARPTRICIVAKSPKKKNLGRPDLPQESGTTVLSSSAAQPDAPGGSEGRAPDWICPICGRIFGTKTGLGVHKRRAHPVEANAEAAPLQVKRRWSDEELLLLARTEAQLTAETGTCSNVDLLAKLPQLQRTLEAIKGQRRSVKYKGLVKASLEELALAAADLASRGSSAEQAPEALPTETQNAECSEVPSVADDPAAVETPDSNAVKVVENLLREAERRKQCRERGAEAAGRRRRKSQKKRILNTALDTLSRKRQRRIEYARVQELFRKCPSRAAAEVIDGHTRETKHSLEVLEAYWRPILEEVSDAPGPTQQALSALKRGASLYESQGGVDDYSRLWAPVTVDEVKASRIDYRSAPGPDGIRAEDWRAVPAASKAEIFNLWMARGDIPEPLRQCRTIFIPKVESPAGPSDYRPISIASIPLRHMHGILAKRLLACCPPDARQRGFVNADGTLENTAVLDAVLGDSRKKLRECHIAVLDFSKAFDTLSHGALLDLLRARGLPKGFCDYLARLYNTAHTILAVKETYSQPVKVGRGVRQGDPLSPILFNMAMDLILASLPKGVGYGLEGEKISALAYADDLVLLAGSKVGMQEAIDTVVQVGGTMGLLVNPKKSSVLSMVPDGKRKKHHYLTERVFSVGKRRLRQVDCVERWRYLGVDFESSGASLIELEVRKALDNITKAPLKPQQRLEIVRGHLIPRFMHGLVLGTISDDRLRMLDIEIRGAVRKWLRLPKDVPKGYFHADVKDGGLAIPSLRTVIPDLVLRRYGGLASSRWSAANAAARSDRIRKKLSWARKQVRKFTREHPKTQVTSVSQYWREVLHASTDGYELRESARNPASTKWIRERCMQYSGRDYVQFVHCHINALPSRVRASRGRRHGRESELNCRAGCMLRETTAHTIQQCFRTHGGRIERHDCVTRIIAEAMSEQGWKVELEPRFTTSRGVRKPDLIAVRGGAGVILDTQIVSGQRPLDDAHRAKRSKYGSHEELVGLVADKLGLSDAACVRTTSCTISWRGVWSGASSKEMQEVIGLKKAIFEIIPGLVLRGSHMNWTRFNQMTAVSAASSD

SEQ ID NO: 33143 - protein, 1003 aa, Vanessa atalanta
MCNRTFNTKTGLGVHKRRAHPVEANAEAAPASVKRRWNEEELLLMARVEAQLTRDTGKCGNVDLLAKLPQLHRTLEAVKGQRRSVKYKGLVQTCLEELAFSAADSIARGGSSIEGALEARPSIVIGSNPEDPPVAEPCQTVETPIGPNAAHVLEDLLRAVERRKRRCEPGAKTRSRRRRKNYDCDIQAASDSMSRRKRRRVEYARMQELFRKCPSRAAAEVIDGHTRDARHGLEEMETFWRPILETVSSASGPTSEALKSLRRGLPSGGVDDYTKLWAPITIDEVKASSIDMRTAPGPDGIRAEDWRAIPASSKAEIFNHWMVQGSIPDPLRQCRTVFIPKSDAPKCPGDYRPISIASIPLRHMHSILAKRLLACCPPDMRQRGFVSADGTLENTAVLDAVLGDSRKKLRECHVAVLDFSKAFDTVSHAALVDLLRARGLPDGFCSYVANLYETASTVLAVKGKVGQPVKMGRGVRQGDPLSPILFNMALDLILASLPKGVGYRLENEQISALAYADDLVLLAGSKVGMQESIDRVVQVAEMVGLNINHGKSSALSMVPDGKRKKHHYLTERVFSVGRKKLRQVSCVERWRYLGVDFESSGALMLEQEVRKALDNISKAPLKPQQRLEIVRGHLIPRFMHGLVLGTISDDRLRMLDIEIRGAVRKWLRLPQDVPKAYFHAEIKAGGLAIPSLRTVVPDLVLRRYGRLDSSRWSAANAAARSDRIRKKLSWAKKLIGKFTKGNPKTQITSVDQYWRETLHASTDGFELRESYRNPASTKWIRERCMQYSGRDFVQFVHCHINALPSRVRVSRGRRCMGESKLNCRAGCMLRETTAHTIQQCFRTHGGRIERHDCITRFIAEALTKMGWTVVVEPRFMTSIGCRKPDLIAVRDGAGVIVDTQIVSGQRPLDDAHRAKRSKYGTHVELVQMVADRLGLSDSECVRSTSCTISWRGVWSGASAREMREILGLDKSWFEQIPGIVLRGSHTNWTRFNQMTAVSAATSG

SEQ ID NO: 33144 - protein, 1003 aa, Vanessa atalanta
MCNRTFNTKTGLGVHKRRAHPVEANAEAAPASVKRRWNEEELLLMARVEAQLTRDTGKCGNVDLLAKLPQLHRTLEAVKGQRRSVKYKGLVQTCLEELAFSAADSIARGGSSTEGALEARPSIVIGSNPEDPPVAEPCQTVETPIGPNAAHVLEDLLRAVERRKRRCEPGAKTRSRRRRKNYDCDIQAASDSMSRRKRRRVEYARMQELFRKCPSRAAAEVIDGHTRDARHGLEEMETFWRPILETVSSASGPTSEALKSLRRGLPSGGVDDYTKLWAPITIDEVKASSIDMRTAPGPDGIRAEDWRAIPASSKAEIFNHWMVQGSIPDPLRQCRTVFIPKSDAPKCPGDYRPISIASIPLRHMHSILAKRLLACCPPDMRQRGFVSADGTLENTAVLDAVLGDSRKKLRECHVAVLDFSKAFDTVSHAALVDLLRARGLPDGFCSYVANLYETASTVLAVKGKVGQPVKMGRGVRQGDPLSPILFNMALDLILASLPKGVGYRLENEQISALAYADDLVLLAGSKVGMQESIDRVVQVAEMVGLNINHGKSSALSMVPDGKRKKHHYLTERVFSVGRKKLRQVSCVERWRYLGVDFESSGALMLEQEVRKALDNISKAPLKPQQRLEIVRGHLIPRFMHGLVLGTISDDRLRMLDIEIRGAVRKWLRLPQDVPKAYFHAEIKAGGLAIPSLRTVVPDLVLRRYGRLDSSRWSAANAAARSDRIRKKLSWAKKLIGKFTKGNPKTQITSVDQYWRETLHASTDGFELRESYRNPASTKWIRERCMQYSGRDFVQFVHCHINALPSRVRVSRGRRCMGESKLNCRAGCMLRETTAHTIQQCFRTHGGRIERHDCITRFIAEALTKMGWTVVVEPRFMTSIGCRKPDLIAVRDGAGVIVDTQIVSGQRPLDDAHRAKRSKYGTHVELVQMVADRLGLSDSECVRSTSCTISWRGVWSGASAREMREILGLDKSWFEQIPGIVLRGSHTNWTRFNQMTAVSAATSG

SEQ ID NO: 33145 - protein, 1097 aa, Junonia pacoma
MGGLNESNSDSTKSSGFLRLGPFEKPWAKPLAGFAARSKRICIVAKSPKKKNLGRPDLPQESGTTVLSSSAAQPDAPGGSEGRAPDWICPICGRIFGTKTGLGVHKRRAHPVEANAEAAPLQVKRRWSDEELLLLARTEAQLTAETGTCSNVDLLAKLPQLQRTLEAIKGQRRSVKYKGLVKASLEELALAAADLASRGSSAEQAPEALPTETQNAECSEVPSVADDPAAVETPDSNAVKVVENLLREAERRKQCRERGAEAAGRRRRKSQKKRILNTALDTLSRKRQRRIEYARVQELFRKCPSRAAAEVIDGHTRETKHSLEVLEAYWRPILEEVSDAPGPTRQALSALKRGASLYESQGGVDDYSRLWAPVTVDEVKASRIDYRSAPGPDGIRAEDWRAVPAASKAEIFNLWMARGDIPEPLRQCRTIFIPKVESPAGPSDYRPISIASIPLRHMHGILAKRLLACCPPDARQRGFVNADGTLENTAVLDAVLGDSRKKLRECHIAVLDFSKAFDTLSHGALLDLLRARGLPKGFCDYLARLYNTAHTILAVKETYSQPVKVGRGVRQGDPLSPILFNMAMDLILASLPKGVGYGLEGEKISALAYADDLVLLAGSKVGMQEAIDTVVQVGGTMGLLVNPKKSSVLSMVPDGKRKKHHYLTERVFSVGKRRLRQVDCVERWRYLGVDFESSGASLIELEVRKALENITKAPLKPQQRLEIVRGHLIPRFMHGLVLGTISDDRLRMLDIEIRGAVRKWLRLPKDVPKGYYHADVKDGGLAIPSLRTVIPDLVLRRYGGLASSRWSAANAAARSDRIRKKLSWARKQVRKFTRDHPKTQVTSVSQYWREVLHASTDGYELRESARNPASTKWIRERCMQYSGRDYVQFVHCHINALPSRVRASRGRRHGRESELNCRAGCTLRETTAHTIQQCFRTHGGRIERHDCVTRIIAEAMSEQGWKVELEPRFTTSRGVRKPDLIAVRGGAGVILDTQIVSGQRPLDDAHRAKRSKYGSHEELVGLVADKLGLSDAACVRTTSCTISWRGVWSGASSKEMQEVIGLKKAIFEIIPGLVLRGSHMNWTRFNQMTAVSAASSD

SEQ ID NO: 33146 - protein, 682 aa, Junonia evarete
MARGDIPEPLRQCRTIFIPKVESPAGPSDYRPISIASIPLRHMHGILAKRLLACCPPDARQRGFVNADGTLENTAVLDAVLGDSRKKLRECHIAVLDFSKAFDTLSHGALLDLLRARGLPKGFCDYLARLYDTAHTILAVKETYSQPVKVGRGVRQGDPLSPILFNMAMDLILASLPKGVGYGLEGEKISALAYADDLVLLAGSKVGMQEAIDTVVQVGGTMGLLVNPKKSSVLSMVPDGKRKKHHYLTERVFSVGKRRLRQVDCVERWRYLGVDFESSGASLIELEVRKALENITKAPLKPQQRLEIVRGHLIPRFMHGLVLGTISDDRLRMLDIEIRGAVRKWLRLPKDVPKGYYHADVKDGGLAIPSLRTVIPDLVLRRYGGLASSRWSAANAAARSDRIRKKLSWARKQVRKFTRDHPKTQVTSVSQYWREVLHASTDGYELRESARNPASTKWIRERCMQYSGRDYVQFVHCHINALPSRVRASRGRRHGRESELNCRAGCTLRETTAHTIQQCFRTHGGRIERHDCVTRIIAEAMSEQGWKVELEPRFTTSRGVRKPDLIAVRGGAGVILDTQIVSGQRPLDDAHRAKRSKYGSHEELVGLVADKLGLSDAACVRTTSCTISWRGVWSGASSKEMQEVIGLKKAIFEIIPGLVLRGSHMNWTRFNQMTAVSASSSD

SEQ ID NO: 33147 - protein, 1003 aa, Vanessa atalanta
MCNRTFNTKTGLGVHKRRAHPVEANAEAAPASVKRRWNEEELLLMARVEAQLTRDTGKCGNVDLLAKLPQLHRTLEAVKGQRRSVKYKGLVQTCLEELAFSAADSIARGGSSTEGALEARPSIVIGSNPEDPPVAEPCQTVETPIGPNAAHVLEDLLRAVERRKRRCEPGAKTRSRRRRKNYDCDIQAASDSMSRRKRRRVEYARMQELFRKCPSRAAAEVIDGHTRDARHGLEEMETFWRPILETVSSASGPTSEALKSLRRGLPSGGVDDYTKLWAPITIDEVKASSIDMRTAPGPDGIRAEDWRAIPASSKAEIFNHWMVQGSIPDPLRQCRTVFIPKSDAPKCPGDYRPISIASIPLRHMHSILAKRLLACCPPDMRQRGFVSADGTLENTAVLDAVLGDSRKKLRECHIAVLDFSKAFDTVSHAALVDLLRARGLPDGFCSYVANLYETASTVLAVKGKVGKPVKMGRGVRQGDPLSPILFNMALDLILASLPKGVGYRLENEQISALAYADDLVLLAGSKVGMQESIDRVVQVAEMVGLNINHGKSSALSMVPDGKRKKHHYLTERVFSVGRKKLRQVSCVERWRYLGVDFESSGALMLEQEVRKALDNISKAPLKPQQRLEIVRGHLIPRFMHGLVLGTISDDRLRMLDIEIRGAVRKWLRLPQDVPKAYFHAEIKAGGLAIPSLRTVVPDLVLRRYGRLDSSRWSAANAAARSDRIRKKLSWAKKLIGKFTKGNPKTQITSVDQYWRETLHAPTDGFELRESYRNPASTKWIRERCMQYSGRDFVQFVHCHINALPSRVRVSRGRRCMGESKLNCRAGCMLRETTAHTIQQCFRTHGGRIERHDCITRFIAEALTKIGWTVVVEPRFMTSIGCRKPDLIAVRDGAGVIVDTQIVSGQRPLDDAHRAKRSKYGTHVELVQMVADRLGLSDSECVRSTSCTISWRGVWSGASAREMREILGLDKSWFEQIPGIVLRGSHTNWTRFNQMTAVSAATSG

SEQ ID NO: 33148 - protein, 1052 aa, Junonia zonalis
MSPKKRVLGRPDLPQESGSTVISSLVLRPDAPGESESVGRSPEWTCPVCGRTFGTKTGLGVHKRRAHPVEANAEAAPRQVKRRWNEEELLLLARTEAQLTVETGSCSNVDLLAKLPNLKRSHEAVKGQRRTAKYKGLVKASLEELARSAPLATMASQTTSAGQSPLARPTETRATGCPEVSPVADDPTVAETPLSSDAAAVLDSLLKAAERRMSRHEQGGTATKRRRIRKGLDDALDKMSRRKRRRIEYGRMQELFRKCPGRAAAEVLGGHTRDTQHTLEELEAYWRPILEEVSDAPGPTIPALRALVTGAPLRDSQGGVVGHSRLWTPVTVDEVKASRVDYRSAPGPDGIRAEDWRTVPDPLKAEIFNSWMRRGEIPEPLRQCKTIFIPKKELPAGPSDYRPISIASVPLRHMHGILAKRLLDCCPPDARQRGFVSADGTLENTAVLDAVLGDSRKKLRECHIAVLDFSKAFDTVSHKALLELLRARGLPKGFCDYLARMYDTAQTILAVKGKRSQPVKVGRGVRQGDPLSPLLFNVAMDLILASLPKGVGYGLEGEKISALAYADDLVLVSGSKIGMQESIDTVVRVGGMMGLEVNSRKSSVLSMVPDGKRKKHHYLTERTFTVGGRKLKQVDCVERWRYLGVDFESSGASMIEMEIRKAIENISKAPLKPQQRLEIVRGHLIPRFMHGLVLGRISDDRLRVLDIEIRGAIRKWLRLAKDVPKGYFHARIKDGGLGIPSLRTVIPELVLRRYGGLASSRWPAANAAARSERIRKKISWARKQLRKFTKVHPRTQESCVSQYWRELLHSSTDGYELRESDRNPASTKWIRERCMQYTGRDYVQFVHCHINALPSRVRASRGQRQGRESELNCRAGCMLRETTAHTIQQCFRTHGGRIERHDCVTRVIAEAMTERGWTVEVEPRLMTSIGLRKPDIIARKEDRGVILDTQIVSGQRPLDDAHRAKRSKYGSHGELVKIVADRLGLSCVEKVRTTSCTISWRGVWSGASIKELIEILAVKRSVLEMIPGLVLRGSHMNWTRFNQMTAVSAVSS

SEQ ID NO: 33149 - protein, 1003 aa, Vanessa atalanta
MCNRTFNTKTGLGVHKRRAHPVEANAEAAPASVKRRWNEEELLLMARVEAQLTRDTGKCGNVDLLAKLPQLHRTLEAVKGQRRSVKYKGLVQTCLEELAFSAADSIARGGSSIEGALEARPSIVIGSNPEDPPVAEPCQTVETPIGPNAAHVLEDLLRAVERRKRRCEPGAKTRSRRRRKNYDCDIQAASDSMSRRKRRRVEYARMQELFRKCPSRAAAEVIDGHTRDARHGLEEMETFWRPILETVSSASGPTSEALKSLRRGLPSGGVDDYTKLWAPITIDEVKASSIDMRTAPGPDGIRAEDWRAIPASSKAEIFNHWMVQGSIPDPLRQCRTVFIPKSDAPKCPGDYRPISIASIPLRHMHSILAKRLLACCPPDMRQRGFVSADGTLENTAVLDAVLGDSRKKLRECHIAVLDFSKAFDTVSHAALVDLLRARGLPDGFCSYVANLYETASTVLAVKGKVGKPVKMGRGVRQGDPLSPILFNMALDLILASLPKGVGYRLENEQISALAYADDLVLLAGSKVGMQESIDRVVQVAEMVGLNINHGKSSALSMVPDGKRKKHHYLTERVFSVGRKKLRQVSCVERWRYLGVDFESSGALMLEQEVRKALDNISKAPLKPQQRLEIVRGHLIPRFMHGLVLGTISDDRLRMLDIEIRGAVRKWLRLPQDVPKAYFHAEIKAGGLAIPSLRTVVPDLVLRRYGRLDSSRWSAANAAARSDRIRKKLSWAKKLIGKFTKGNPKTQITSVDQYWRETLHASTDGFELRESYRNPASTKWIRERCMQYSGRDFVQFVHCHINALPSRVRVSRGRRCMGESKLNCRAGCMLRETTAHTIQQCFRTHGGRIERHDCITRFIAEALTKIGWTVVVEPRFMTSIGCRKPDLIAVRDGAGVIVDTQIVSGQRPLDDAHRAKRSKYGTHVELVQMVADRLGLSDSECVRSTSCTISWRGVWSGASAREMREILGLDKSWFEQIPGIVLRGSHTNWTRFNQMTAVSAATSG

SEQ ID NO: 33150 - protein, 1003 aa, Vanessa atalanta
MCNRTFNTKTGLGVHKRRAHPVEANAEAAPASVKRRWNEEELLLMARVEAQLTRDTGKCGNVDLLAKLPQLHRTLEAVKGQRRSVKYKGLVQTCLEELAFSAADSIARGGSSTEGALEARPSIVIGSNPEDPPVAEPCQTVETPIGPNAAHVLEDLLRAVERRKRRCEPGAKTRSRRRRKNYDCDIQAASDSMSRRKRRRVEYARMQELFRKCPSRAAAEVIDGHTRDARHGLEEMETFWRPILETVSSASGPTSEALKSLRRGLPSGGVDDYTKLWAPITIDEVKASSIDMRTAPGPDGIRAEDWRAIPASSKAEIFNHWMVQGSIPDPLRQCRTVFIPKSDAPKCPGDYRPISIASIPLRHMHSILAKRLLACCPPDMRQRGFVSADGTLENTAVLDAVLGDSRKKLRECHIAVLDFSKAFDTVSHAALVDLLRARGLPDGFCSYVANLYETASTVLAVKGKVGKPVKMGRGVRQGDPLSPILFNMALDLILASLPKGVGYRLENEQISALAYADDLVLLAGSKVGMQESIDRVVQVAEMVGLNINHGKSSALSMVPDGKRKKHHYLTERVFSVGRKKLRQVSCVERWRYLGVDFESSGALMLEQEVRKALDNISKAPLKPQQRLEIVRGHLIPRFMHGLVLGTISDDRLRMLDIEIRGAVRKWLRLPQDVPKAYFHAEIKAGGLAIPSLRTVVPDLVLRRYGRLDSSRWSAANAAARSDRIRKKLSWAKKLIGKFTKGNPKTQITSVDQYWRETLHASTDGFELRESYRNPASTKWIRERCMQYSGRDFVQFVHCHINAPPSRVRVSRGRRCMGESKLNCRAGCMLRETTAHTIQQCFRTHGGRIERHDCITRFIAEALTKIGWTVVVEPRFMTSIGCRKPDLIAVRDGAGVIVDTQIVSGQRPLDDAHRAKRSKYGTHVELVQMVADRLGLSDSECVRSTSCTISWRGVWSGASAREMREILGLDKSWFEQIPGIVLRGSHTNWTRFNQMTAVSAATSG

SEQ ID NO: 33151 - protein, 1029 aa, Pararge aegeria
MVNSSSAAQPGASGESVGSAGRASEWNCPSCGRGFRTKTGLGVHRRRAHPVEANAEAAPSQVKRRWLDEELDLLARTEALLTLEASGPCTNVALAARLPQLHRTLEAIKGQRRAAKYKGMVKTHLAYLVAQRAADDAGASSSVDASVSAQESGEVESADADDQAPVVQTPISVDAARVLSDLLAGAEARIRRGGLGARAARHLRHTKRHGFLNEPIALDSLSNRKRRRMEYARVQELFRKCPGRAAAEVIDGHCRETKHSLEEMEAYWRPILEAVSNAPGPTPESLRELRPPSDGTHDYSKLWAPITEQEVKASRVDPKTAPGPDGIRAADWSRVSVPLKAEIFNHWMTSGEIPEPLRQCRTVFVPKSDAPQNPGEYRPISIASVPLRHMHSILARRLLDCCPPDMRQRGFVCADGTVENTAVLDAVLGDSRKKLRECHMAVLDFSKAFDTVSHAALVELLRARGLPGAFCSYIARLYETAHTTLAVKNKLSEPVKVGRGVRQGDPLSPILFNMAMDLILANLPSGVGYGLESERVSALAYADDLVLLAGSKVGMQESIDCVARFGDMVGLRINFGKSSVLSMVPDGHRKKHHYLTEKTFSIGRRKLRQVSCVERWRYLGVDFEASGSKTIEHDVKIALNNISKAPLKPQQRLEILRGHLVPRFMHGFVLGTISDDRLRRLDVQIRGAVRKWLRLPHDVPVAYYHAAIKDGGLAIPSLRTVVPDLIVRRFGALGSSRWVAARAAARSTRIRNKLRWARRQQEKFTRKASERDTPCVAQYWREGLHASTDGLELRESSRNPASTKWIRERCMEYSGRDFVQFVHCHINGLPSRVRVTRGRREGRESQLICRAGCVVRETTAHTIQQCFRTHGGRIERHNCVARFVANAMTQQGWKVEHEPRFVTSLGVRKPDIIAVRGAAGVILDAQVVSGQRSLDEAHRAKRSKYGSHAELVRLVAGRLGLPSPDCVRTTTCTISWRGVWSHSSVKEMKDILGLPCHVFERVPGLVLRGSHMNWVRFNQMTAVSTASPH

SEQ ID NO: 33152 - protein, 1029 aa, Pararge aegeria
MVNSSSAAQPGASGESVGSAGRASEWNCPSCGRGFRTKTGLGVHRRRAHPVEANAEAAPSQVKRRWLDEELDLLARTEALLTLEASGPCTNVALAARLPQLHRTLEAIKGQRRAAKYKGMVKTHLAYLVAQRAADDAGASSSVDASVSAQESGEVESADADDQAPVVQTPISVDAARVLSDLLAGAEARIRRGGLGARAARHLRHTKRHGFLNEPIALDSLSNRKRRRMEYARVQELFRKCPGRAAAEVIDGHCRETKHSLEEMEAYWRPILEAVSNAPGPTPESLRELRPPSDGTHDYSKLWAPITEQEVKASRVDPKTAPGPDGIRAADWSRVSVPLKAEIFNHWMTSGEIPEPLRQCRTVFVPKSDAPQNPGEYRPISIASVPLRHMHSILARRLLDCCPPDMRQRGFVCADGTVENTAVLDAVLGDSRKKLRECHMAVLDFSKAFDTVSHAALVELLRARGLPGAFCSYIARLYETAHTTLAVKNKLSEPVKVGRGVRQGDPLSPILFNMAMDLILANLPSGVGYGLESERVSALAYADDLVLLAGSKVGMQESIDCVARFGDMVGLRINFGKSSVLSMVPDGHRKKHHYLTEKTFSIGRRKLRQVSCVERWRYLGVDFEASGSKTIEHDVKIALNNISKAPLKPQQRLEILRGHLVPRFMHGFVLGTISDDRLRRLDVQIRGAVRKWLRLPHDVPVAYYHAAIKDGGLAIPSLRTVVPDLIVRRFGALGSSQWVAARAAARSTRIRNKLRWARRQQEKFTRKASERDTPCVAQYWREGLHASTDGLELRESSRNPASTKWIRERCMEYSGRDFVQFVHCHINGLPSRVRVTRGRREGRESQLICRAGCVVRETTAHTIQQCFRTHGGRIERHNCVARFVANAMTQQGWKVEHEPRFVTSLGVRKPDIIAVRGAAGVILDAQVVSGQRSLDEAHRAKRSKYGSHAELVRLVAGRLGLPSPDCVRTTTCTISWRGVWSHSSVKEMKDILGLPCHVFERVPGLVLRGSHMNWVRFNQMTAVSTASPH

SEQ ID NO: 33153 - protein, 1003 aa, Vanessa atalanta
MCNRTFNTKTGLGVHKRRAHPVEANAEAAPASVKRRWNEEELLLMARVEAQLTRDTGKCGNVDLLAKLPQLHRTLEAVKGQRRSVKYKGLVQTCLEELAFSAADSIARGGSSTEGALKARPSIVIGSNPEDPPVAEPCQTVETPIGPNAAHVLEDLLRAVERRKRRCEPGAKTRSRRRRKNYDCDIQAASDSMSRRKRRRVEYARMQELFRKCPSRAAAEVIDGHTRDARHGLEEMETFWRPILETVSSASGPTSEALKSLRRGLPSGGVDDYTKLWAPITIDEVKASSIDMRTAPGPDGIRAEDWRAIPASSKAEIFNHWMVQGSIPDPLRQCRTVFIPKSDAPKCPGDYRPISIASIPLRHMHSILAKRLLACCPPDMRQRGFVSADGTLENTAVLDAVLGDSRKKLRECHVAVLDFSKAFDTVSHAALVDLLRARGLPDGFCSYVANLYETASTVLAVKGKVGQPVKMGRGVRQGDPLSPILFSMALDLILASLPKGVGYRLENEQISALAYADDLVLLAGSKVGMQESIDRVVQVAEMVGLNINHGKSSALSMVPDGKRKKHHYLTERVFSVGRKKLRQVSCVERWRYLGVDFESSGALMLEQEVRKALDNISKAPLKPQQRLEIVRGHLIPRFMHGLVLGTISDDRLRMLDIEIRGAVRKWLRLPQDVPKAYFHAEIKAGGLAIPSLRTVVPDLVLRRYGRLDSSRWSAANAAARSDRIRKKLSWAKKLIGKFTKGNPKTQITSVDQYWRETLHASTDGFELRESYRNPASTKWIRERCMQYSGRDFVQFVHCHINALPSRVRVSRGRRCMGESKLNCRAGCMLRETTAHTIQQCFRTHGGRIERHDCITRFIAEALTKIGWTVVVEPRFMTSIGCRKPDLIAVRDGAGVIVDTQIVSGQRPLDDAHRAKRSKYGTHVELVQMVADRLGLSDSECVRSTSCTISWRGVWSGASAREMREILGLDKSWFEQIPGIVLRGSHTNWTRFNQMTAVSAATSG

SEQ ID NO: 33154 - protein, 848 aa, Taenaris catops
MRSCGLGARAARRFRSTRKNQTMPLLIPSNNDALDKMSARKRRRVEYARMQELFRKCPSRAAAEAIDGHCRDTRHGLEEMEAYWRPILEAVSTAPGAPPEALQALRRAETKGGATRDYAKLWAPITVTDVKASLVDIKTAPGPDGIRAEDWRRVPASSKAEIFNSWMTTGEIPEPLRQCRTVFVPKCEVPTGPSDYRPISIASVPLRHMHSILARRLIDCCPPDTRQRGFICADGTMENTAVLDAVLGDSRKKLKECHLAVLDFSKAFDTVSHGALVGLLRARGLPDEFCSYIARLYDTAHTTLAVNRQKSEPVKVGRGVRQGDPLSPLLFNMAMDVILASLPSGVGYGLEAERVSALAYADDLVLLAGSKVGMQESIDCVVRSGELMGLRVNLGKSSVLSMVPDGHRKKHHFLTQRVFSVGRKKLRQVSCVERWRYLGVDFESTGSKTIEHDVSRALTNITKAPLKPQQRLEIVRGHLVSRFMHGFVLGTISDDRLRMMDVQIRGAVRTWLRLPHDVPVAYFHAAIKDGGLAIPSLRAVVPELILRRFGALQTSQWSVARAAARSDRIQRKLRWACKQSRKFTRHDSVSDSPTVKQFWREGLHASVDGFELRESSRCPESTKWIRERCAQYSGRDYVQFVHCHINALPSRIRGSRGRRSGREAELNCRAGCALRETTAHTIQQCHRTHGGRIERHNCIVRYVAEAMASEGWTVESEPRFVTSLGIRKPDIIAAKDGVGVILDAQVVSGQRPLDDAHRAKRSKYGKHVELVEKVAGRLGLPQPNCVRSTSCTVSWRGVWSPASLREMRELLGLKRHVFEVVPGLALRGSHMNWTRFNQITAVSTALPD

SEQ ID NO: 33155 - protein, 1029 aa, Pararge aegeria
MVNSSSAAQPGASGESVGSAGRASEWNCPSCGRGFRTKTGLGVHRRRAHPVEANAEAAPSQVKRRWLDEELDLLARTEALLTLEASGPCTNVALAARLPQLHRTLEAIKGQRRAAKYKGMVKTHLAYLVAQRAADDAGASSSVDASVSAQESGEVESADADDQAPVVQTPISEDAARVLSDLLAGAEARIRRGGLGARAARHLRHTKRHGFLNEPIALDSLSNRKRRRMEYARVQELFRKCPGRAAAEVIDGHCRETKHSLEEMEAYWRPILEAVSNAPGPTPESLRELRPPSDGTHDYSKLWAPITEQEVKASRVDPKTAPGPDGIRAADWSRVSVPLKAEIFNHWMTSGEIPEPLRQCRTVFVPKSDAPQNPGEYRPISIASVPLRHMHSILARRLLDCCPPDMRQRGFVCADGTVENTAVLDAVLGDSRKKLRECHMAVLDFSKAFDTVSHAALVELLRARGLPGAFCSYIARLYETAHTTLAVKNKLSEPVKVGRGVRQGDPLSPILFNMAMDLILANLPSGVGYGLESERVSALAYADDLVLLAGSKVGMQESIDCVARFGDMVGLRINFGKSSVLSMVPDGHRKKHHYLTEKTFSIGRRKLRQVSCVERWRYLGVDFEASGSKTIEHDVKIALNNISKAPLKPQQRLEILRGHLVPRFMHGFVLGTISDDRLRRLDVQIRGAVRKWLRLPHDVPVAYYHAAIKDGGLAIPSLRTVVPDLIVRRFGALGSSQWVAARAAARSTRIRNKLRWARRQQEKFTRKASERDTPCVAQYWREGLHASTDGLELRESSRNPASTKWIRERCMEYSGRDFVQFVHCHINGLPSRVRVTRGRREGRESQLICRAGCVVRETTAHTIQQCFRTHGGRIERHNCVARFVANAMTQQGWKVEHEPRFVTSLGVRKPDIIAVRGAAGVILDAQVVSGQRSLDEAHRAKRSKYGSHAELVRLVAGRLGLPSPDCVRTTTCTISWRGVWSHSSVKEMKDILGLPCHVFERVPGLVLRGSHMNWVRFNQMTAVSTASPH

SEQ ID NO: 33156 - protein, 1102 aa, Junonia genoveva
MPQQSRWVVSLSLTRIPPSLAVFFGWDLSKNRGRNLWLGLQPGQRGYQVAKSPKEKILGRPDLPQESGTTVISSSAAQPDAPGGSEGRAADWICPICGRIFGTKTGLGVHKRRAHPVEANAEAAPLQVKRRWSDEELLLLARTEAQLTAETGTCSNVDLLAKLPQLQRTLEAIKGQRRSVKYKGLVKASLEELALAAADPASGGSSAEQAPEALPTETQNAECPEVPSVADDPAAVETPDSNAVKVVENLLREAERRKQCRERGAEAAGRRRRKSQKKRILNTALDTLSRKRQRRIEYARVQELFRKCPSRAAAEVIDGHTRETKHSLEVLEAYWRPILEEVSDAPGPTRQALSALKRGASLYESQGGVDDYSRLWAPVTVDEVKASRIDYRSAPGPDGIRAEDWRAVPAASKAEIFNLWMARGDIPEPLRQCRTIFIPKVESPAGPSDYRPISIASIPLRHMHGILAKRLLACCPPDARQRGFVNADGTLENTAVLDAVLGDSRKKLRECHIAVLDFSKAFDTLSHGALLDLLRARGLPKGFCDYLARLYNTAHTILAVKETYSQPVKVGRGVRQGDPLSPILFNMAMDLILASLPKGVGYGLEGEKISALAYADDLVLLAGSKVGMQEAIDTVVQVGGTMGLLVNPKKSSVLSMVPDGKRKKHHYLTERVFSVGKRRLRQVDCVERWRYLGVDFESSGASLIELEVRKALENITKAPLKPQQRLEIVRGHLIPRFMHGLVLGTISDDRLRMLDIEIRGAVRKWLRLPKDVPKGYYHADVKDGGLAIPSLRTVIPDLVLRRYGGLASSRWSAANAAARSDRIRKKLSWARKQVRKFTRDHPKTQVTSVSQYWREVLHASTDGYELRESARNPASTKWIRERCMQYSGRDYVQFVHCHINALPSRVRASRGRRHGRESELNCRAGCTLRETTAHTIQQCFRTHGGRIERHDCVTRIIAEAMSEQGWKVELEPRFTTSRGVRKPDLIAVRGGAGVILDTQIVSGQRPLDDAHRAKRSKYGSHEELVGLVADKLGLSDAACVRTTSCTISWRGVWSGASSKEMQEVIGLKKAIFEIIPDLILRGSHIDWTRFNQMTAVSAASSD

SEQ ID NO: 33157 - protein, 1151 aa, Pararge aegeria
MVCAAGVPFLFFGSYAGGAGRSQACHWILYGVCGAPPTIFGGVIQVRLELRRCNSPSGGFFQPFSRLFPPSPIASFGWDLCESYGRIPVVGFAARHSGKLIIAKSPNSKCEGHPDLPQESGSMVNSSSAAQPGASGESVGSAGRASEWNCPSCGRGFRTKTGLGVHRRRAHPVEANAEAAPSQVKRRWLDEELDLLARTEALLTLEASGPCTNVALAARLPQLHRTLEAIKGQRRAAKYKGMVKTHLAYLVAQKAADDAGASSSVDASVSAQESGEVESADADDQAPVVQTPISVDAARALSDLLAGAEARIRRGGLGARAARHLRHTKRHGFLNEPIALDSLSNRKRRRMEYARVQELFRKCPGRAAAEVIDGHCRETKHSLEEMEAYWRPILEAVSNAPGPTPESLRELRPPSDGTHDYSKLWAPITEQEVKASRVDPKTAPGPDGIRAADWSRVSVPLKAEIFNHWMTSGEIPEPLRQCRTVFVPKSDAPQNPGEYRPISIASVPLRHMHSVLARRLLDCCPPDTRQRGFVCADGTVENTAVLDAVLGDSRKKLRECHMAVLDFSKAFDTVSHAALVELLRARGLPGAFCSYIARLYETAHTTLAVKNKLSEPVKVGRGVRQGDPLSPILFNMAMDLILANLPSGVGYGLESERVSALAYADDLVLLAGSKVGMQESIDCVARFGDMVGLRINFGKSSVLSMVPDGHRKKHHYLTEKTFSIGRRKLRQVSCVERWRYLGVDFEASGSKTIEHDVKIALNNISKAPLKPQQRLEILRGHLVPRFMHGFVLGTISDDRLRRLDVLIRGAVRKWLRLPHDVPVAYYHAAIKDGGLAIPSLRTVVPDLIVRRFGALGSSQWVAARAAARSTRIRNKLRWARRQQEKFTRKASERDTPCVAQYWREGLHASTDGLELRESSRNPASTKWIRERCMEYSGRDFVQFVHCHINGLPSRVRVTRGRREGRESQLICRAGCVVRETTAHTIQQCFRTHGGRIERHNCVARFVANAMTQQGWKVEHEPRFVTSLGVRKPDIIAVRGAAGVILDAQVVSGQRSLDEAHRAKRSKYGSHAELVRLVAGRLGLPSPDCVRTTTCTISWRGVWSHSSVKEMKDILGLPCHVFERVPGLVLRGSHMNWVRFNQMTAVSTASPH

SEQ ID NO: 33158 - protein, 1053 aa, Junonia genoveva
MSPKKKRNLGRPDLPQESGSTVISSLVVRPDAPGESESVGRSPEWTCPVCGRTFGTKTGLGVHKRRAHPVEANAEAAPRQVKRRWNEEELLLLARTEAQLTVETGSCSNVDLLAKLPNLKRSHEAVKGQRRTAKYKGLVKASLEELARSAPLATMASQTTSAGQSPLARPTETRATGCPEVSPVADDPTVAETPLSSDAAAVLDSLLKAAERRMSRHEQGGTATKRRRIRKGLDDALDKMSRRKRRRIEYGRMQELFRKCPGRAAAEVLGGHTRDTQHTLEELEAYWRPILEEVSDAPGPTIPALRALVTGAPLRDSQGGVVGHSRLWTPVTVDEVKASRVDYRSAPGPDGIRAEDWRTVPDPLKAEIFNSWMRRGEIPEPLRQCKTIFIPKKELPAGPSDYRPISIASVPLRHMHGILAKRLLDCCPPDARQRGFVSADGTLENTAVLDAVLGDSRKKLRECHIAVLDFSKAFDTVSHKALLELLRARGLPKGFCDYLARMYDTAQTILAVKGKRSQPVKVGRGVRQGDPLSPLLFNVAMDLILASLPKGVGYGLEGEKISALAYADDLVLVSGSKIGMQESIDTVVRVGGMMGLEVNSRKSSVLSMVPDGKRKKHHYLTERTFTVGGRKLKQVDCVERWRYLGVDFESSGASMIEMEIREAIENISKAPLKPQQRLEIVRGHLIPRFMHGLVLGRISDDRLRVLDIEIRGAVRKWLRLAKDVPKGYFHARIKDGGLGIPSLRTVIPELVLRRYGGLASSRWPAANAAARSERIRKKISWARKQLRKFTKVHPRTQESCVSQYWRELLHSSTDGYELRESDRNPASTKWIRERCMQYTGRDYVQFVHCHINALPSRVRASRGQRQGRESELNCRAGCMLRETTAHTIQQCFRTHGGRIERHDCVTRVIAEAMTERGWTVEVEPRLMTSIGLRKPDIIARKEDRGVILDTQIVSGQRPLDDAHRAKRSKYGNHGELVKIVADRLGLSCVEKVRTTSCTISWRGVWSGASIKELIEILAVKRSVLEMIPGLVLRGSHMNWTRFNQMTAVSAVSS

SEQ ID NO: 33159 - protein, 682 aa, Junonia villida
MTRGDIPEPLRQCRTIFIPKVESPAGPSDYRPISIASIPLRHMHGILAKRLLACCPPDARQRGFVNADGTLENTAVLDAVLGDSRKKLRECHIAVLDFSKAFDTLSHGALLDLLRARGLPKAFCDYLARLYNTAHTILAVKNTYSQPVKVGRGVRQGDPLSPILFNMAMDLVLASLPKGVGYGLEGEKISALAYADDLVLLAGSKVGMQEAIDTVVQVGGTMGLLVNPRKSSVLSMVPDGKRKKHHYVTERIFSVGTRRLRQVDCVERWRYLGVDFESSGASMIELEVRKALDNITKAPLKPQQRLEIVRGHLIPRFMHGLVLGTISDDRLRMLDIEIRGAVRKWLRLPNDVPKGYYHADVKDGGLAIPSLRTVIPDLVVRRYGGLASSRWSAANAAARSDRIRKKLSWAHKQVRKFTREHPQTQITSVSQYWREVLHASTDGYELRESARNPASTKWIRERCMQYSGRDYVQFVHCHINALPSRVRASRGRRHGRESELNCRAGCTLRETTAHTIQQCFRTHGGRIERHDCVTRIVAEAMSEQGWKVELEPRFTTSRGVRKPDLIAVRGGAGVILDTQIVSGQRPLDDAHRAKRSKYGSHEELVGLVADRLGLSDAACVRTTSCTISWRGVWSGASSKEMKEVIGLKKAIFEIIPGLVLRGSHINWTRFNQMTAVSAASSD

SEQ ID NO: 33160 - protein, 1029 aa, Pararge aegeria
MVNSSSAAQPGASGESVGSAGRASEWNCPSCGRGFRTKTGLGVHRRRAHPVEANAEAAPSQVKRRWLDEELDLLARTEALLTLEASGPCTNVALAARLPQLHRTLEAIKGQRRAAKYKGMVKTHLAYLVAQRAADDAGASSSVDASVSAQESGEVESADADDQAPVVQTPISVDAARVLSDLLAGAEARIRRGGLGARAARHLRHTKRHGFLNEPIALDSLSNRKRRRMEYARVQELFRKCPGRAAAEVIDGHCRETKHSLEEMEAYWRPILEAVSNAPGPTPESLRELRPPSDGTHDYSKLWAPITEQEVKASRVDPKTAPGPDGIRAADWSRVSVPLKAEIFNHWMTSGEIPEPLRQCRTVFVPKSDAPQNPGEYRPISIASVPLRHMHSILARRLLDCCPPDMRQRGFVCADGTVENTAVLDAVLGDSRKKLRECHMAVLDFSKAFDTVSHAALVELLRARGLPGAFCSYIARLYETAHTTLAVKNKLSEPVKVGRGVRQGDPLSPILFNMAMDLILANLPSGVGYGLESERVSALAYADDLVLLAGSKVGMQESIDCVARFGDMVGLRINFGKSSVLSMVPDGHRKKHHYLTEKTFSIGRRKLRQVSCVERWRYLGVDFEASGSKTIEHDVKIALNNISKAPLKPQQRLEILRGHLVPRFMHGFVLGTISDDRLRRLDVQIRGAVRKWLRLPHDVPVAYYHAAIKDGGLAIPSLRTVVPDLIVRRFGALGSSQWVAARAAARSTRIRNKLRWARRQQEKFTRKASERDTPCVAQYWREGLHASTDGLELRESSRNPASTKWIRERCMEFSGRDFVQFVHCHINGLPSRVRVTRGRREGRESQLICRAGCVVRETTAHTIQQCFRTHGGRIERHNCVARFVANAMTQQGWKVEHEPRFVTSLGVRKPDIIAVRGAAGVILDAQVVSGQRSLDEAHRAKRSKYGSHAELVRLVAGRLGLPSPDCVRTTTCTISWRGVWSHSSVKEMKDILGLPCHVFERVPGLVLRGSHMNWVRFNQMTAVSTASPH

SEQ ID NO: 33161 - protein, 1029 aa, Pararge aegeria
MVNSSSAAQPGASGESVGSAGRASEWNCPSCGRGFRTKTGLGVHRRRAHPVEANAEAAPSQVKRRWLDEELDLLARTEALLTLEASGPCTNVALAARLPQLHRTLEAIKGQRRAAKYKGMVKTHLAYLVAQRAADDAGASSSVDASVSAQESGEVESADADDQAPVVQTPISVDAARVLSDLLAGAEARIRRGGLGARAARHLRHTKRHGFLNEPIALDSLSNRKRRRMEYARVQELFRKCPGRAAAEVIDGHCRETKHSLEEMEAYWRPILEAVSNAPGPTPESLRELRPPSDGTHDYSKLWAPITEQEVKASRVDPKTAPGPDGIRAADWSRVSVPLKAEIFNHWMTSGEIPEPLRQCRTVFVPKSDAPQNPGEYRPISIASVPLRHMHSILARRLLDCCPPDMRQRGFVCADGTVENTAVLDAVLGDSRKKLRECHMAVLDFSKAFDTVSHAALVELLRARGLPGAFCSYIARLYETAHTTLAVKNKLSEPVKVGRGVRQGDPLSPILFNMAMDLILANLPSGVGYGLESERVSALAYADDLVLLAGSKVGMQESIDCVARFGDMVGLRINFGKGSVLSMVPDGHRKKHHYLTEKTFSIGRRKLRQVSCVERWRYLGVDFEASGSKTIEHDVKIALNNISKAPLKPQQRLEILRGHLVPRFMHGFVLGTISDDRLRRLDVQIRGAVRKWLRLPHDVPVAYYHAAIKDGGLAIPSLRTVVPDLIVRRFGALGSSQWVAARAAARSTRIRNKLRWARRQQEKFTRKASERDTPCVAQYWREGLHASTDGLELRESSRNPASTKWIRERCMEYSGRDFVQFVHCHINGLPSRVRVTRGRREGRESQLICRAGCVVRETTAHTIQQCFRTHGGRIERHNCVARFVANAMTQQGWKVEHEPRFVTSLGVRKPDIIAVRGAAGVILDAQVVSGQRSLDEAHRAKRSKYGSHAELVRLVAGRLGLPSPDCVRTTTCTISWRGVWSHSSVKEMKDILGLPCHVFERVPGLVLRGSHMNWVRFNQMTAVSTASPH

SEQ ID NO: 33162 - protein, 1052 aa, Junonia evarete
MSPKKRVLGRPDLPQESGSTVISSLVLRPDAPGESESVGRSPEWTCPVCGRTFGTKTGLGVHKRRAHPVEANAEAAPRQVKRRWNEEELLLLARTEAQLTVETGSCSNVDLLAKLPNLKRSHEAVKGQRRTAKYKGLVKASLEELARSAPLATMASQTTSAGQSPLARPTETRATGCPEVSPVADDPTVAETPLSSDAAAVLDSLLKAAERRMSRHEQGGTATKRRRIRKGLDDALDKMSRRKRRRIEYGRMQELFRKCPGRAAAEVLGGHTRDTQHTLEELEAYWRPILEEVSDAPGPTIPALRALVTGAPLRDSQGGVVGHSRLWTPVTVDEVKASRVDYRSAPGPDGIRAEDWRTVPDPLKAEIFNSWMRRGEIPEPLRQCKTIFIPKKELPAGPSDYRPISIASVPLRHMHGILAKRLLDCCPPDARQRGFVSADGTLENTAVLDAVLGDSRKKLRECHIAVLDFSKAFDTVSHKALLELLRARGLPKGFCDYLARMYDTAQTILAVKGKRSQPVKVGRGVRQGDPLSPLLFNVAMDLILASLPKGVGYGLEGEKISALAYADDLVLVSGSKIGMQESIDTVVRVGGMMGLEVNSRKSSVLSMVPDGKRKKHHYLTEKTFTVGGRKLKQVDCVERWRYLGVDFESSGASMIEMEIRKAIENISKAPLKPQQRLEIVRGHLIPRFMHGLVLGRISDDRLRVLDIEIRGAIRKWLRLAKDVPKGYFHARIKDGGLGIPSLRTVIPELVLRRYGGLASSRWPAANAAARSERIRKKISWARKQLRKFTKVHPRTQESCVSQYWRELLHSSTDGYELRESDRNPASTKWIRERCMQYTGRDYVQFVHCHINALPSRVRASRGQRQGRESELNCRAGCMLRETTAHTIQQCFRTHGGRIERHDCVTRVIAEAMTERGWTVEVEPRLMTSIGLRKPDIIARKEDRGVILDTQIVSGQRPLDEAHRAKRSKYGSHGELVKIVADRLGLSCVEKVRTTSCTISWRGVWSGASIKELIEILAVKRSVLEMIPGLVLRGSHMNWTRFNQMTAVSAVSS

SEQ ID NO: 33163 - protein, 1102 aa, Junonia evarete
MPQQSRWVVSLSLTRIPPSLAVFFGWDLSKNRGRNLWLGLQPGQRGYQVAKSPKEKILGRPDLPQESGTTVISSSAAQPDAPGGSEGRAADWICPICGRIFGTKTGLGVHKRRAHPVEANAEAAPLQVKRRWSDEELLLLARTEAQLTAETGTCSNVDLLAKLPQLQRTLEAIKGQRRSVKYKGLVKASLEELALAAADPASGGSSAEQAPEALPTETQNAECPEVPSVADDPAAVETPDSNAVKVVENLLREAERRKQCRERGAEAAGRRRRKSQKKRILNTALDTLSRKRQRRIEYARVQELFRKCPSRAAAEVIDGHTRETKHSLEVLEAYWRPILEEVSDAPGPTRQALSALKRGASLYESQGGVDDYSRLWAPVTVDEVKASRIDYRSAPGPDGIRAEDWRAVPAASKAEIFNLWMARGDIPEPLRQCRTIFIPKVESPAGPSDYRPISIASIPLRHMHGILAKRLLACCPPDARQRGFVNADGTLENTAVLDAVLGDSRKKLRECHIAVLDFSKAFDTLSHGALLDLLRARGLPKGFCDYLARLYNTAHTILAVKETYSQPVKVGRGVRQGDPLSPILFNMAMDLILASLPKGVGYGLEGEKISALAYADDLVLLAGSKVGMQEAIDTVVQVGGTMGLLVNPKKSSVLSMVPDGKRKKHHYLTERVFSVGKRRLRQVDCVERWRYLGVDFESSGASLIELEVRKALENITKAPLKPQQRLEIVRGHLIPRFMHGLVLGTISDDRLRMLDIEIRGAVRKWLRLPKDVPKGYYHADVKDGGLAIPSLRTVIPDLVLRRYGGLASSRWSAANAAARSDRIRKKLSWARKQVRKFTREHPKTQITSVSQYWREVLHASTDGYELRESARNPASTKWIRERCMQYSGRDYVQFVHCHINALPSRVRASRGRRHGRESELNCRAGCTLRETTAHTIQQCFRTHGGRIERHDCVTRIIAEAMSEQGWKVELEPRFTTSRGVRKPDLIAVRGGAGVILDTQIVSGQRPLDDAHRAKRSKYGSHEELVGLVADKLGLSDAACVRTTSCTISWRGVWSGASSKEMQEVIGLKKAIFEIIPGLVLRGSHMNWTRFNQMTAVSAASSD

SEQ ID NO: 33164 - protein, 1029 aa, Pararge aegeria
MVNSSSAAQPGASGESVGSAGRASEWNCPSCGRGFRTKTGLGVHRRRAHPVEANAEAAPSQVKRRWLDEELDLLARTEALLTLEASGPCTNVALAARLPQLHRTLEAIKGQRRAAKYKGMVKTHLAYLVAQKAADDAGASSSVDASVSAQESGEVESADADDQAPVVQTPISVDAARALSDLLAGAEARIRRGGLGARAARHLRHTKRHGFLNEPIALDSLSNRKRRRMEYARVQELFRKCPGRAAAEVIDGHCRETKHSLEEMEAYWRPILEAVSNAPGPTPESLRELRPPSDGTHDYSKLWAPITEQEVKASRVDPKTAPGPDGIRAADWSRVSVPLKAEIFNHWMTSGEIPEPLRQCRTVFVPKSDAPQNPGEYRPISIASVPLRHMHSILARRLLDCCPPDMRQRGFVCADGTVENTAVLDAVLGDSRKKLRECHMAVLDFSKAFDTVSHAALVELLRARGLPGAFCSYIARLYETAHTTLAVKNKLSEPVKVGRGVRQGDPLSPILFNMAMDLILANLPSGVGYGLESERVSALAYADDLVLLAGSKVGMQESIDCVARFGDMVGLRINFGKSSVLSMVPDGHRKKHHYLTEKTFSIGRRKLRQVSCVERWRYLGVDFEASGSKTIEHDVKIALNNISKAPLKPQQRLEILRGHLVPRFMHGFVLGTISDDRLRRLDVQIRGAVRKWLRLPHDVPVAYYHAAIKDGGLAIPSLRTVVPDLIVRRFGALGSSQWVAARAAARSTRIRNKLRWARRQQEKFTRKASERDTPCVAQYWREGLHASTDGLELRESSRNPASTKWIRERCMEYSGRDFVQFVHCHINGLPSRVRVTRGRREGRESQLICRAGCVVRETAAHTIQQCFRTHGGRIERHNCVARFVANAMTQQGWKVEHEPRFVTSLGVRKPDIIAVRGAAGVILDAQVVSGQRSLDEAHRAKRSKYGSHAELVRLVAGRLGLPSPDCVRTTTCTISWRGVWSHSSVKEMKDILGLPCHVFERVPGLVLRGSHMNWVRFNQMTAVSTASPH

SEQ ID NO: 33165 - protein, 1097 aa, Junonia evarete
MGGLNESNSDSTKSSGFLRLGPFEKPWAKPLAGFAARSKRICIVAKSPKKKNLGRPDLPQESGTTVLSSSAAQPDAPGGSEGRAPDWICPICGRIFGTKTGLGVHKRRAHPVEANAEAAPLQVKRRWSDEELLLLARTEAQLTAETGTCSNVDLLAKLPQLQRTLEAIKGQRRSVKYKGLVKASLEELALAAADLASRGSSAEQAPEALPTETQNAECSEVPSVADDPAAVETPDSNAVKVVENLLREAERRKQCRERGAEAAGRRRRKSQKKRILNTALDTLSRKRQRRIEYARVQELFRKCPSRAAAEVIDGHTRETKHSLEVLEAYWRPILEEVSDAPGPTQQALSALKRGASLYESQGGVDDYSRLWAPVTVDEVKASRIDYRSAPGPDGIRAEDWRAVPAASKAEIFNLWMARGDIPEPLRQCRTIFIPKVESPAGPSDYRPISIASIPLRHMHGILAKRLLACCPPDARQRGFVNADGTLENTAVLDAVLGDSRKKLRECHIAVLDFSKAFDTLSHGALLDLLRARGLPKGFCDYLARLYNTAHTILAVKETYSQPVKVGRGVRQGDPLSPILFNMAMDLILASLPKGVGYGLEGEKISALAYADDLVLLAGSKVGMQEAIDTVVQVGGTMGLLVNPKKSSVLSMVPDGKRKKHHYLTERVFSVGKRRLRQVDCVERWRYLGVDFESSGASLIELEVRKALDNITKAPLKPQQRLEIVRGHLIPRFMHGLVLGTISDDRLRMLDIEIRGAVRKWLRLPKDVPKGYYHADVKDGGLAIPSLRTVIPDLVLRRYGGLASSRWSAANAAARSDRIRKKLSWARKQVRKFTRDHPKTQVTSVSQYWREVLHASTDGYELRESARNPASTKWIRERCMQYSGRDYVQFVHCHINALPSRVRASRGRRHGRESELNCRAGCTLRETTAHTIQQCFRTHGGRIERHDCVTRIIAEAMSEQGWKVELEPRFTTSRGVRKPDLIAVRGGAGVILDTQIVSGQRPLDDAHRAKRSKYGSHEELVGLVADKLGLSDAACVRTTSCTISWRGVWSGASSKEMQEVIGLKKAIFEIIPGLVLRGSHMNWTRFNQMTAVSAASSD

SEQ ID NO: 33166 - protein, 1097 aa, Junonia litoralis; identical to SEQ ID NO: 33145

SEQ ID NO: 33167 - protein, 1033 aa, Junonia villida
MTLLTLALRPDAPGESASVGRSPEWTCPVCGRTFGTKTGLGVHKRRAHPVEANAEAAPKQVKRRWNEEELLLLARTEAQLTVETGSCSNVDLLAKLPQLQRSHEAIKGQRRTAKYKGLVKASLEELACSAPLMTVASQTTSTGQSPLARPTETQAVGGSEVSPDVDDPTVAETPMSSDAAAVLDSLLKAAERRMSRHEQGGTATKRRSIRKGLDDALDKMSRRKRRRIEYGRMQELFRKCPGRAAAEVLDGHTRDTQHTLEELEAYWRPILEEVSDAPGPTIPALRALVTGAPLRDSQGGVVDHSRLWTPVTVDEVKASRVDYRSAPGPDGIRAEDWRTVPDPLKAEIFNSWMRLGEIPEPLRQCKTIFIPKKELPAGPSDYRPISIASVPLRHMHGILAKRLLNCCPPDARQRGFVSADGTLENTAVLDAVLGDSRKKLRECHIAVLDFSKAFDTVSHKALLELLRARGLPKGFCDYLARLYDTAQTILAVKGKRSQPVKVGRGVRQGDPLSPLLFNVAMDLVLASLPKGVGYGLEGEKISALAYADDLVLVTGSKIGMQESIDTVVRVGGMMGLKVNSRKSSVLSMVPDGKRKKHHYLTERTFTVGGRKLKQVDCVERWRYLGVDFESSGASMIEVEIRKAIENISKAPLKPQQRLEIVRGHLIPRFMHGLVLGRISDDRLRVLDIEIRGAIRKWLRLAKDVPKGYFHANIKDGGLGIPSLRTIIPELVLRRYGGLVSSRWPAANAAARSERIRKKISWARKQLRKFTKVHPKTQESCVSQYWREMLHASTDGYELRESDRNPASTKWIRERCMQYTGRDFVQFVHCHINALPSRVRASRGQRQGRESELNCRAGCMLRETTAHTIQQCFRTHGGRIERHDCVTRAIAQAMTERGWTVEVEPRLMTSIGLRKPDIIASKEDKGVILDTQIVSGQRPLDDAHRAKRSKYGSHEELVKMVADRLGLSCASKVRTTSCTISWRGVWSGASIKELIEILAVKRSVLEMIPGLVLRGSHINWTRFNQMTSVSAVSS

SEQ ID NO: 33168 - protein, 1043 aa, Melitaea cinxia
MNPNTENLDRPDLPQESGSTVNPSPVARPGTSGGSVGRAPGWTCPVCGRTFTTKTGLGVHKRRAHPVEANAEAAPLQVKRRWCEEELSLMARTEAQFTVDTGKCSNVDLLAKLPQLQRTLEAIKGQRRSVKYKGLVKACLEEIALSSSGPASRGSIAEQPPETQPLGPPDVSTEVSPVVDKPAEAVEASLSPEAAQALESLLLRAERRKRCQGRGAKAAKRSRRTSRTVDDIAPVSISNRKRRRMEYARMQELFRKCPSRAAAEVIDGHTRVVRHTLEDLETYWRPVLEEVSTAPGPTRKALDALTRGEVADYSGLWAPITVEEVKASCVDSRTAPGPDGIRSEEWRAVPAPLKAEIFSDWLAKGAIPDPLRQCRTIFVPKNNIPAGPGDYRPISVASVPLRHMHGILAKRLLRCCPLDARQRGFVSADGALENTAVLDAVLGDSRKKLRECHVAVLDFAKAFDTVSHGALLELLKARGLPEGFLSYLAHMYETAHTTLAVNGENSRPVKVGRGVRQGDPLSPVLFNMAMDLILASLPKGVGYGLEGEKVAALAYADDLILVAGSKVGMQESIDCVVEVGEMIGLRVNTSKSSVLSMVPDGKRKKHHYPTNRMFTVGRSKLRQVTSVERWRYLGVDFESAGTAMLELQVRKALDNITRAPLKPQQRLEIVRGHLIPRFIHGLVLGRISDDRLRMLDIEVRGAVRKWLRLPIDVPKGYFHAEAKDGGLAIPSLQAVTPELILRRYGGLASSRWAAAKAAAKSERIRKKLSWARKQVRKFTRDHPVSNLTSVSQYWREMLHASTDGHELRESSRNPASTKWIRERCMEYSGRDYVQFVHCHINALPSRVRASRGRRDGRESELSCRAGCTVRETTAHVIQQCHRTHGGRVKRHDCVTRFIAEAMTGKGWKVLLEPRFTTSIGCRKPDIIASRDGVGVIVDAQVVSGQRPLDDAHREKRRKYGKHEELVQLVAEKLELPCTKSVRSTSCTISWRGVWSGASLNEMQKLLGLNRAVFETIPGMVLRGSHMNWTRFNQMTAVAAEASD

SEQ ID NO: 33169 - protein, 1043 aa, Melitaea cinxia
MNPNTENLDRPDLPQESGSTVNPSPVARPGTSGGSVGRAPGWTCPVCGRTFTTKTGLGVHKRRAHPVEANAEAAPLQVKRRWCEEELSLMARTEAQFTVDTGKCSNVDLLAKLPQLQRTLEAIKGQRRSVKYKGLVKACLEEIALSSSGPASRGSIAEQPPETRPLGPPDVSTEVSPVVDKPAEAVEASLSPEAAQALESLLLRAERRKRCQGRGAKAAKRSRRTSRTVDDIAPVSISNRKRRRMEYARMQELFRKCPSRAAAEVIDGHTRVVRHTLEDLETYWRPVLEEVSTAPGPTRKALDALTRGEVADYSGLWAPITVEEVKASCVDSRTAPGPDGIRSEEWRAVPAPLKAEIFSDWLAKGAIPDPLRQCRTIFVPKNDIPAGPGDYRPISVASVLLRHMHGILAKRLLRCCPLDARQRGFVSADGALENTAVLDAVLGDSRKKLRECHVAVLDFAKAFDTVSHGALLELLKARGLPEGFLSYLAHMYETAHTTLAVNGKNSRPVKVGRGVRQGDPLSPVLFNMAMDLILASLPKGVGYGLEGEKVAALAYADDLILVAGSKVGMQESIDCVVEVGEMMGLRVNTSKSSVLSMVPDGKRKKHHYPTNRMFTVGRSKLRQVTSVERWRYLGVDFESAGTAMLELQVRKALDNITRAPLKPQQRLEIVRGHLIPRFIHGLVLGRISDDRLRMLDIEVRGAVRKWLRLPIDVPKGYFHAEAKDGGLAIPSLQAVTPELILRRYGGLASSRWAAAKAAAKSERIRKKLSWARKQVRKFTRDHPVSNLTSVSQYWREMLHASTDGHELRESSRNPASTKWIRERCMEYSGRDYVQFVHCHINALPSRVRASRGRRDGRESELSCRAGCTVRETTAHVIQQCHRTHGGRVKRHDCVTRFIAEAMTGKGWKVLLEPRFTTSIGCRKPDIIASRDGVGVIVDAQVVSGQRPLDDAHREKRRKYGKHEELVQLVAEKLELPCTKSVRSTSCTISWRGVWSGASLNEMQKLLGLNRAVFETIPGMVLRGSHMNWTRFNQMTAVAAEASD

SEQ ID NO: 33170 - protein, 1055 aa, Nymphalis io
MGDLTVAKSPNKKILGRPDLPQESGSTVSSSPVVRSGVPGGNAGRPLGWTCPMCGRSFGTKTGLGVHKRRAHPVEANAEAAPALVKRRWSEEELLLMARVEAQLTRETGKCPNADLLAKLPQLRRTLEAVKGQRRSAKYKGLVKTCLEELALSEVEPNARRGSRTERTPEVLPTRESESASEDPPDDEPRRTAQTPVSSNAAQVLEDLLREIERRKRRCEPGAKARRRLRRKNNGFDYPSASDFRSSRRRRRAEYAQMQELFRKCPSRAAAEVIDGHTRAVRHSLGELETYWRPILEAVSSAPGPSKEALKAFGKGLPYGGVNDYAKLWAPVTIDEVKASRIDMRTAPGPDGIRAEDWRAIPASSKAEMFNEWMIQGSIPESLRQCRAIFIPKSDAPKGPGDYRPISIASVPLRHLHSILARRLLACCPPDGRQRGFVSADGTLENTAVLDAVLGDSRKKLRECHVAVLDFSKAFDTVSHAALVELLGARGLPDGFCRYMATMYETASTTLAVGNERSHPVKVGRGVRQGDPLSPILFNMAMDLVLASLPKGIGYRLENEQISALAYADDLVLLAGSKVGMQEAIDRVVQVGEMVGLGINIGKSSVLSMVPDGKRKKHHYLTERVFSVGKKKLRQVSCVERWRYLGIDFESSGASMLEQEVRKALDNISKAPLKPQQRLEVVRGHLIPRFMHGLVLGTISDDRLRMLDIEIRGAVRKWLRLPHDVPKAYFHADVKAGGLAIPSLRTVVPNLILRRYGRLASSRWSAANAAARSERIRRKLSWAKKQLRKLTRENPKTHLTSVEQYWRESLYASTDGLELRESFRNPASTKWIRERCMQYSGRDYVQFVHCHINALPSRVRASRGRRCMGESTLNCRAGCMLRETTAHTIQQCFRTHGGRIERHNCITSVIAEALTKKGWTVVVEPRFMTSVGCRKPDIIAARNGAGVIVDTQIVSGQRPLDDAHRAKRSKYGKHAELVQLVADKLGLSGAESVCATSCTVSWRGVWSGASAREMRELLGLNKSIFEQIPGLVLRGSHMNWTRFNQMTAVSTVTPD

SEQ ID NO: 33171 - protein, 1097 aa, Junonia evarete; identical to SEQ ID NO: 33165

SEQ ID NO: 33172 - protein, 954 aa, Melitaea cinxia
MARTEAQFTVDTGKCSNVDLLAKLPQLQRTLEAIKGQRRSVKYKGLVKACLEEIALSSSGPASRGSIAEQPPETRPLGPPDVSTEVSPVVDKPAEAVEASLSPEAAQALESLLLRAERRKRCQGRGAKAAKRSRRTSRTDDDIAPVSISNRKRRRMEYARMQELFRKCPSRAAAEVIDGHTRVVRHTLEDLETYWRPVLEEVSTAPGPTRKALDALTRGEVADYSGLWAPITVEEVKASCVDSRTAPGPDGIRSEEWRAVPAPLKAEIFSDWLAKGAIPDPLRQCRTIFVPKNDIPAGPGDYRPISVASVPLRHMHGILAKRLLRCCPLDARQRGFVSADGALENTAVLDAVLGDSRKKLRECHVAVLDFAKAFDTVSHGALLELLKARGLPEGFLSYLAHMYETAHTTLAVNGKNSRPVKVGRGVRQGDPLSPVLFNMAMDLILASLPKGVGYGLEGEKVAALAYADDLILVAGSKVGMQESIDCVVEVGEMMGLRVNTSKSSVLSMVPDGKRKKHHYPTNRMFTVGRSKLRQVTSVERWRYLGVDFESAGTAMLELQVRKALDNITRAPLKPQQRLEIVRGHLIPRFIHGLVLGRISDDRLRMLDIEVRGAVRKWLRLPIDVPKGYFHAEAKDGGLAIPSLQAVTPELILRRYGGLASSRWAAAKAAAKSERIRKKLSWARKQVRKFTRDHPVSNLTSVSQYWREMLHASTDGHELRESSRNPASTKWIRERCMEYSGRDYVQFVHCHINALPSRVRASRGRRDGRESELSCRAGCTVRETTAHVIQQCHRTHGGRVKRHDCVTRFIAEAMTGKGWKVLLEPRFTTSIGCRKPDIIASRDGVGVIVDAQVVSGQRPLDDAHREKRRKYGKHEELVQLVAEKLELPCTKSVRSTSCTISWRGVWSGASLNEMQKLLGLNRAVFETIPGMVLRGSHMNWTRFNQMTAVAAEASD

SEQ ID NO: 33173 - protein, 1055 aa, Nymphalis io
MGDLTVAKSPNKKILGRPDLPQESGSTVSSSPVVRSGVPGGNAGRPLGWTCPMCGRSFGTKTGLGVHKRRAHPVEANAEAAPALVKRRWSEEELLLMARVEAQLTRETGKCPNADLLAKLPQLRRTLEAVKGQRRSAKYKGLVKTCLEELALSEVEPNARRGSRTERTPEVLPTRESESASEDPPDDEPRRTAQTPVSSNAAQVLEDLLREIERRKRRCEPGAKARRRLRRKNNGFDYPSASDFRSSRRRRRAEYAQMQELFRKCPSRAAAEVIDGHTRAVRHSLGELETYWRPILEAVSSAPGPSKEALKAFGKGLPYGGVNDYAKLWAPVTIDEVKASRIDMRTAPGPDGIRAEDWRAIPASSKAEMFNEWMIQGSIPESLRQCRAIFIPKSDAPKGPGDYRPISIASVPLRHLHSILARRLLACCPPDGRQRGFVSADGTLENTAVLDAVLGDSRKKLRECHVAVLDFSKAFDTVSHAALVELLRARGLPDGFCRYMATMYETASTTLAVGNERSQPVKVGRGVRQGDPLSPILFNMAMDLVLASLPKGIGYRLENEQISALAYADDLVLLAGSKVGMQEAIDRVVQVGEMVGLGINIGKSSVLSMVPDGKRKKHHYLTERVFSVGKKKLRQVSCVERWRYLGIDFESSGASMLEQEVRKALDNISKAPLKPQQRLEVVRGHLIPRFMHGLVLGTISDDRLRMLDIEIRGAVRKWLRLPHDVPKAYFHADVKAGGLAIPSLRTVVPNLILRRYGRLASSRWSAANAAARSERIRRKLSWAKKQLSKLTRENPKTHLTSVEQYWRESLYASTDGLELRESFRNPASTKWIRERCMQYSGRDYVQFVHCHINALPSRVRASRGRRCMGESTLNCRAGCMLRETTAHTIQQCFRTHGGRIERHNCITSVIAEALTKKGWTVVVEPRFMTSVGCRKPDIIAARNGAGVIVDTQIVSGQRPLDDAHRAKRSKYGKHAELVQLVADKLGLSGAESVCATSCTVSWRGVWSGASAREMRELLGLNKSIFEQIPGLVLRGSHMNWTRFNQMTAVSTVTPD

SEQ ID NO: 33174 - protein, 1043 aa, Melitaea cinxia
MNPNIENLDRPDLPQESGSTVNPSPVARPGTSGGSVGRAPGWTCPVCGRTFSTKTGLGVHKRRAHPVEANAEAAPLQVKRRWCEEELSLMARTEAQFTVDTGKCSNVDLLAKLPQLQRTLEAIKGQRRSVKYKGLVKACLEEIALSSSGPASRGSIAEQPPETRPLGPPDVSTEVSPVVDKPAEAVEASLSPEAAQALESLLLRAERRKRCQGRGAKAAKRSRRTSRTVDDIAPVSISNRKRRRMEYARMQELFRKCPSRAAAEVIDGHTRVVRHTLEDLETYWRPVLEEVSTAPGPTRKALDALTRGEVADYSGLWAPITVEEVKASCVDSRTAPGPDGIRSEEWRAVPAPLKAEIFSDWLAKGAIPDPLRQCRTIFVPKNNIPAGPGDYRPISVASVPLRHMHGILAKRLLRCCPLDARQRGFVSADGALENTAVLDAVLGDSRKKLRECHVAVLDFAKAFDTVSHGALLELLKARGLPEGFLSYLAHMYETAHTTLAVNGKNSRPVKVGRGVRQGDPLSPVLFNMAMDLILASLPKGVGYGLEGEKVAALAYADDLILVAGSKVGMQESIDCVVEVGEMMGLRVNTSKSSVLSMVPDGKRKKHHYPTNRMFTVGRSKLRQVTSVERWRYLGVDFESAGTAMLELQVRKALDNITRAPLKPQQRLEIVRGHLIPRFIHGLVLGRISDDRLRMLDIEVRGAVRKWLRLPIDVPKGYFHAEAKDGGLAIPSLQAVTPELILRRYGGLASSRWAAAKAAAKSERIRKKLSWARKQVRKFTRDHPVSNLTSVSQYWREMLHASTDGHELRESSRNPASTKWIRERCMEYSGRDYVQFVHCHINALPSRVRASRGRRDGRESELSCRAGCTVRETTAHVIQQCHRTHGGRVKRHDCVTRFIAEAMTGKGWKVLLEPRFTTSIGCRKPDIIASRDGVGVIVDAQVVSGQRPLDDAHREKRRKYGKHEELVQLVAEKLELPCTKSVRSTSCTISWRGVWSGASLNEMQKLLGLNKAVFETIPGMVLRGSHMNWTRFNQMTAVAAEASD

SEQ ID NO: 33175 - protein, 1052 aa, Junonia evarete; identical to SEQ ID NO: 33162

SEQ ID NO: 33176 - protein, 1055 aa, Nymphalis io
MGDLTVAKSPNKKILGRPDLPQESGSTVSSSPVVRSGVPGGNAGRPLGWTCPMCGRSFGTKTGLGVHKRRAHPVEANAEAAPALVKRRWSEEELLLMARVEAQLTRETGKCPNADILAKLPQLRRTLEAVKGQRRSAKYKGLVKSCLEELALSEVEPNARRGSRTERTPEVLPTREPESASEDPPDDEPRRTAQTPVSSNAAQVLEDLLREIERRKRRCEPGAKARRRLRRKNNGFDYPSASDFRSSRRRRRAEYAQMQELFRKCPSRAAAEVIDGHTRAVRHSLGELETYWRPILEAVSSAPGPSKEALKAFGKGLPYGGVNDYAKLWAPVTIDEVKASRIDMRTAPGPDGIRAEDWRAIPASSKAEMFNEWMIQGSIPESLRQCRAIFIPKSDAPKGPGDYRPISIASVPLRHLHSILARRLLACCPPDGRQRGFVSADGTLENTAVLDAVLGDSRKKLRECHVAVLDFSKAFDTVSHAALVELLRARGLPDGFCRYMATMYETASTTLAVGNERSHPVKVGRGVRQGDPLSPILFNMAMDLVLASLPKGIGYRLENEQISALAYADDLVLLAGSKVGMQEAIDRVVQVGEMVGLGINIGKSSVLSMVPDGKRKKHHYLTERVFSVGKKKLRQVSCVERWRYLGIDFESSGASMLEQEVRKALDNISKAPLKPQQRLEVVRGHLIPRFMHGLVLGTISDDRLRMLDIEIRGAVRKWLRLPHDVPKAYFHADVKAGGLAIPSLRTVVPNLILRRYGRLASSRWSAANAAARSERIRRKLSWAKKQLSKLTRENPKTHLTSVEQYWRESLYASTDGLELRESFRNPASTKWIRERCMQYSGRDYVQFVHCHINALPSRVRASRGRRCMGESTLNCRAGCMLRETTAHTIQQCFRTHGGRIERHNCITSVIAEALTKKGWTVVVEPRFMTSVGCRKPDIIAARNGAGVIVDTQIVSGQRPLDDAHRAKRSKYGKHAELVQLVADKLGLSGAESVCATSCTVSWRGVWSGASAREMRELLGLNKSIFEQIPGLVLRGSHMNWTRFNQMTAVSTVTPD

SEQ ID NO: 33177 - protein, 913 aa, Limenitis camilla
MVKTFLEDLTTQMPTQATSRDSGTNRVEVPQPCALSEDASEDLPPADDPTMTIAPLSVDTARALSRLLKVAKRRLKRRGLGANGMRRPPPGHGESYPAPDSMSSRRRRRMEYARIQELFRKCPGRAAAEVIDGRARVVKHSLEELEAFWRPILETMSEAPGPTEEALRAIKQADAPVGTRDYAQLWRPITSDEVLATRFDLQTAPGPDGIRPDEWRAVPDPMKAEIFNSWMATGGVPEPLRRCRTIFVPKTDTPSGPSDYRPISIASVPLRHFHTVLAHRLLDVCPPDTRQRGFVRTDGTLENTAVLDAVLGDSRKNLRECHVAVLDFSRAFDTVSHAALIGLLRARGLPIRFCDYLASLYDTATTTLAVNGRHSRPVKVGRGVRQGDPLSPLLFNMAMDLILASLPVGVGYRLESENISALAYADDLVLLASSRVGMQESIDRVAKVGASVGLHVNRSKSSVLSMVPDGHRKKHHYLTEKAFSLGKKSLRQVSCIERWRYLGVDFGTSGTESVELEVSNALTNISRAPLKPQQRLEIVRGHLIPRFVHGLVLGRVTDDRLRMLDNQIRGAVRKWLRLPTDVPKAYFHASVSDGGLGVPSVRALLPCIIARRYDRLAKSSWGAAVAASRTNRIRRKLSWAKRQISKLGITSPSDANASPARFWREKLYASVDGFELRESFRIPASTKWIRERSGQFSGRDFVQFVHTHINALPSRIRASRGRREGRESELNCRAGCTLRETTAHVIQQCHRTHGGRIERHDLVTRVVADAMTKKGWDVELEPKFTTSRGNRKPDVVAKRGGVGVILDTQVVSGQRSLDEAHRSKRSKYGSDGELVERVAGRLGLPSSECVRSTSCTISWRGVWSPASVKEMRELLGLEKSVFECIPGIVLRGSHMNWTRFNRMTNVITAFSPD

SEQ ID NO: 33178 - protein, 1047 aa, Limenitis camilla
MVLQNRNKGRPVLPQETGSGSNPSPAAQPGEPVSVAGGSSDWTCSVCERPFNTIVGLGVHFRRAHPTEANMEAAPKEVKRRWKEEEVSLLARTEAQVTFETGTCGNFELLERLPQLKRSLEAIKGKRRGVEYKRMVKTFLEDLTTQMPTQATSRDSGTNRVEVPQPCALSEDASEDLPPADDPTMTIAPLSVDTARALSRLLKVAKRRLKRRGLGANGMRRPPPGHGESYPAPDSMSSRRRRRMEYARIQELFRKCPGRAAAEVIDGRARVVKHSLEELEAFWRPILETVSEAPGPTEEALRAIKQADAPVGTRDYAQLWRPITSDEVLATRFDLQTAPGPDGIRPDEWRAVPDPMKAEIFNSWMATGGVPEPLRRCRTIFVPKTDTPSGPSDYRPISIASVPLRHFHTVLAHRLLDVCPPDTRQRGFVRTDGTLENTAVLDAVLGDSRKNLRECHVAVLDFSRAFDTVSHAALIGLLRARGLPIRFCDYLASLYDTATTTLAVNGRHSRPVKVGRGVRQGDPLSPLLFNMAMDLILASLPVGVGYRLESENISALAYADDLVLLASSRVGMQESIDRVAKVGASVGLHVNRSKSSVLSMVPDGHRKKHHYLTEKAFSLGKKSLRQVSCIERWRYLGVDFGTSGTESVELEVSNALTNISRAPLKPQQRLEIVRGHLIPRFVHGLVLGRVTDDRLRMLDNQIRGAVRKWLRLPTDVPKAYFHASVSDGGLGVPSVRALLPCIIARRYDRLAKSSWGAAVAASRTNRIRRKLSWAKRQISKLGITSPSDANASPARFWREKLYASVDGFELRESFRTPASTKWIRERSGQFSGRDFVQFVHTHINALPSRIRASRGRREGRESELNCRAGCTLRETTAHVIQQCHRTHGGRIERHDLVTRVVADAMTRKGWDVELEPKFATSRGNRKPDVVAKRGGVGVILDTQVVSGQRSLDEAHRSKRSKYGSDGELVERVAGRLGLPSSECVRSTSCTISWRGVWSPASVKEMRELLGLEKSVFECIPGIVLRGSHMNWTRFNRMTNVITAFSPD

SEQ ID NO: 33179 - protein, 977 aa, Limenitis camilla
MEAAPKEVKRRWKEEEVSLLAHTEAQVTFETGTCGNFELLERLPQLKRSLEAIKGKRRGVEYKRMVKTFLEDLTTQMPTQATSRDSGTNRVEVPQPCALSEDASEDLPPADDPTMTIAPLSVDTARALSRLLKVAKRRLKRRGLGANGMRRPPPGHGESYPAPDSMSSRRRRRMEYARIQELFRKCPGRAAAEVIDGRARVVKHSLEELEAFWRPILETVSEAPGPTEEALRAIKQADAPVGTRDYAQLWRPITSDEVLATRFDLQTAPGPDGIRPDEWRAVPDPMKAEIFNSWMATGGVPEPLRRCRTIFVPKTDTPSGPSDYRPISIASVPLRHFHTVLAHRLLDVCPPDTRQRGFVRTDGTLENTAVLDAVLGDSRKNLRECHVAVLDFSRAFDTVSHAALIGLLRARGLPIRFCDYLASLYDTATTTLAVNGRHSRPVKVGRGVRQGDPLSPLLFNMAMDLILASLPVGVGYRLESENISALAYADDLVLLASSRVGMQESIDRVAKVGASVGLHVNRSKSSVLSMVPDGHRKKHHYLTEKAFSLGKKSLRQVSCIERWRYLGVDFGTSGTESVELEVSNALTNISRAPLKPQQRLEIVRGHLIPRFVHGLVLGRVTDDRLRMLDNQIRGAVRKWLRLPTDVPKAYFHASVSDGGLGVPSVRALLPCIIARRYDRLAKSSWGAAVAASRTNRIRRKLSWAKRQISKLGITSPSDANASPARFWREKLYASVDGFELRESFRTPASTKWIRERSGQFSGRDFVQFVHTHINALPSRIRASRGRREGRESELNCRAGCTLRETTAHVIQQCHRTHGGRIERHDLVTRVVADAMTRKGWDVELEPKFATSRGNRKPDVVAKRGGVGVILDTQVVSGQRSLDEAHRSKRSKYGSDGELVERVAGRLGLPSSECVRSTSCTISWRGVWSPASVKEMRELLGLEKSVFECIPGIVLRGSHMNWTRFNRMTNVITAFSPD

SEQ ID NO: 33180 - protein, 1047 aa, Limenitis camilla
MVLQNRNKGRPVLPQETGSGSNPSPAAQPGEPVSVAGGSSDWTCSVCERPFNTIVGLGVHFRRAHPTEANMEAAPKEVKRRWKEEEVSLLAHTEAQVTFETGTCGNFELLERLPQLKRSLEAIKGKRRGVEYKRMVKTFLEDLTTQMPTQATSRDSGTNRVEVPQPCALSEDASEDLPPADDPTMTIAPLSVDTARALSRLLKVAKRRLKRRGLGANGMRRPPPGHGESYPAPDSMSSRRRRRMEYARIQELFRKCPGRAAAEVIDGRARVVKHSLEELEAFWRPILETVSEAPGPTEEALRAIKQADAPVGTRDYAQLWRPITSDEVLATRFDLQTAPGPDGIRPDEWRAVPDPMKAEIFNSWMATGGVPEPLRRCRTIFVPKTDTPSGPSDYRPISIASVPLRHFHTVLAHRLLDVCPPDTRQRGFVRTDGTLENTAVLDAVLGDSRKNLRECHVAVLDFSRAFDTVSHAALIGLLRARGLPIRFCDYLASLYDTATTTLAVNGRHSRPVKVGRGVRQGDPLSPLLFNMAMDLILASLPVGVGYRLESENISALAYADDLVLLASSRVGMQESIDRVAKVGASVGLHVNRSKSSVLSMVPDGHRKKHHYLTEKAFSLGKKSLRQVSCIERWRYLGVDFGTSGTESVELEVSNALTNISRAPLKPQQRLEIVRGHLIPRFVHGLVLGRVTDDRLRMLDNQIRGAVRKWLRLPTDVPKAYFHASVSDGGLGVPSVRALLPCIIARRYDRLAKSSWGAAVAASRTNRIRRKLSWAKRQISKLGITSPSDANASPARFWREKLYASVDGFELRESFRTPASTKWIRERSGQFSGRDFVQFVHTHINALPSRIRASRGRREGRESELNCRAGCTLRETTAHVIQQCHRTHGGRIERHDLVTRVVADAMTRKGWDVELEPKFATSRGNRKPDVVAKRGGVGVILDTQVVSGQRSLDEAHRSKRSKYGSDGELVERVAGRLGLPSSECVRSTSCTISWRGVWSPASVKEMRELLGLEKSVFECIPGIVLRGSHMNWTRFNRMTNVITAFSPD

SEQ ID NO: 33181 - protein, 1030 aa, Lycaena phlaeas
MGVLSSDTESGAPTRTGGQPDWTCEVCARTFSTKIGLGVHKRRTHPIVTNRDAAPNRVKRRWHDEELALLARTEAQLVREKGRCTNVDLLARLPQLERSLEAIKGQRRGEKYRGMVREFLASVPEAPSPVPEILSGGRGSPPPQTVAVEPMMDESGPSSAVETPVANTPTVTNAASRAVSETLEDLLQRAERRRAQSGLSARATRRIPRTGIDGAHSARLSKRKLRRIEYARVQELYKKCRGRAAKEVIDGQSRAVGHSLEVLEAHWRPVLESASGARGPESEILEAAKLMGKYEGADSSGLSSLWHPFTLDEVNGVRVDLDTAPGPDGIRAEEWRAVPNSRKAEIFNVWMQAGEIPEALRQCRTIFVPKKDDPAGPSDYRPISIASIPLRHMHAILARRVLACCPPDPRQRGFIHADGTLENSAVLDAVMGDCRKRLKECHVAVLDFSKAFDTVSHKALVELLGARGLPKAFVNYITRLYDTATTTLAVNGSTSAPVRVRKGVRQGDPLSPILFNIVMDSVLASLPSFVGYRLEGELVSALAYADDLVLISGSKVGMQELLDCVAQSGEQLGLRINRQKSSVLSLVPDGHRKKLHYLTEKSFKVGGCKLQQVSCVEGWRYLGIDFQATGCVMLENDISQALNNISKAPLKPQQRLEIVRGHLVPRFLHGLVLGKITDDRLRVLDIQIRGAVRKWLRLPMDVPTAYFHAGVKDGGLGIPSLRAIVPDLIVKRYGALVSSRWGVARAAARSDRIRKKLAWARKQVGRFTKDTPNGSATVGEFWRSLLYTSTDGFELRESFRTTASTKWLRERSNRFSGRDYVQFVHTHINALPSRVRMTRGRRGGGETELNCRAGCMVRETTAHTIQQCHRTHGGRIERHNLVAKVISQEMTRKGWRVEAEPRFRTSLGIRKPDIIAVREGEGVILDVQIVSGQRPLDEAHRAKRTKYGGHEELVERVADRLGLPVRSVRCTSCTLSWRGVWSKGSLNEMRELLHFESSLFESIPELVLRGSHMNWTRFNRMTTVREGAPV

SEQ ID NO: 33182 - protein, 943 aa, Curetis bulis
MPQLQRSLEAIKGQRRSAKYRSLVQSYLAEVNAAPTDDLGFIGFENHSSPMNALVQRGNPSSIDNSDVPTSCDDPLEAGDGPTAVSALPDALRTLTELLSRAGGRKVRLGMKAKTARRILKPGIDGAPSVRMSKKRLRRIEYARVQELFKKCPGRAAAEIIDGQHGALRHGLAELESYWRPVLEAESDALGPAPEALRALRQGGQYGGATDCSRLWSPITLDELKEARVDLNTAPGPDGIRAEEWRAVPNVQKAEIFNSWMRTGEIPEPLRQCRTIFVPKKESPAGPGDYRPISIASIPLRHMHGILARRLLTCCPPDYRQRGFVYADGTAENTAVLDAVLGDCRKRLKECHMAVLDFSKAFDTVSHAALVSLLGARGLPKAFCDYIARLYAGASTTLVVGHESSEPVRVAKGVRQGDPLSPVLFNLAMDVILASLPRFVGYRLEGELVSALAYADDLVLVTGSKAGMQECLNQVVSVGSTMGLYINSEKSAVLSMVPDGHRKKHHYLTERTFKVGRRKLRQVSCVERWRYLGIDFRASGCEMLEHDVKNALINIKKAPLKPQQRLEIIRTHLIPRFMHGLVLGRNSDDRLRVLDIQIRGAVREWLRLPKDVPTAYFHASVKDGGLAIPSLRAVVPDLVLKRYGRLASSQWAAAQAAAKSERIRKKLAWARKQQRKFTRVNPNSNKVTVAQFWRESLYDSVDGLELRESSKTPASTKWLRERSGEYSGRDFVQFVHTHINALPSRMRVSRGQRSGRRESELNCRAGCTVRETTAHTIQQCHRTHGGRIERHDLVASVISSEMTKLGWTVQKEPRFVTSQGVRKPDIIAMRDGAGVIVDAQVVSGQRPLDDAHRAKRLKYGGHEELVKMVADRLGLPDSKCVKATSCTISWRGVWSPASVKEMRDLLGLRSFPFELIPGLVLRGSHMNWTRFNKMTSVRYGPPD

SEQ ID NO: 33183 - protein, 750 aa, Autochton longipennis
MMRGSVTSRRNRHNTKKHNRRNTEAKLSSKKRRSMEYARVQELYRKFPGRAAAEVLDGECRGVRHSLRELEAYWRPVLEAVSDASGPTPEALRAARRNGQYGGTLDRLEMLKLWSPFTEEEVKAAKLDLRTAPGPDGIRPEDWRSVPAETKAEIFNSWLSKGEIPLPLRQCRTVFVPKRDEPAGPGDYRPISIASIPLRHMHALLARRLEACCPPDARQRGFIRADGTLENSAVLDAVLGDCRKKLRECHIAVLDFAKAFDTVSHAALVGVLREKGLPVGFCDYVARLYETAQTTLAVGNEKSEPVVVGRGVRQGDPLSPLLFNMALDVVLGSLPKEVGYRLEGEQVSALAYADDLVLLAGSKAGMQEAIDAVAGAGEALGLQLNREKSSVLSMVPDGKRKKPHYVTTRSFKLGRRWLRQVDSVEHWRYLGVEMATSGAVTIELDVKQALENIQKAPLKPQQRLEVVRTYLIPRFLHGLVLGNISDDRLRMLDVQIRHSVRQWLRLPKDVPIGYFHASTRDGGLAIPSLRTCVPDLIQRRFGKLDSSRWSVARAASKSERIRRKVKWAEKQLRKFSAEVPRTGERTVVQYWREKLHNSVDGFELRESTKVPASTKWITKKTGDLNGRDYIQCVQTHINALPSRVRNTRGRRTGRESELNCRAGCMVRETTAHTIQQCHRTHGGRILRHNCIAEYLAKELERAGWSVEQEPRIETAVGLRKPDIIASRDGGAGVIVDVQVVSGQRPLDDAH

SEQ ID NO: 33184 - protein, 1052 aa, Codatractus cyledis
MIAKGTQEKYEKVPPDLPQESGSASNPHSAVQPGASDGPGTSAGFICSNCARVFTTKTGLGVHVRRAHPVVANAQSAPPQVKRRWRDEELQLLACTEARLVREGSGNTNVGLLKALPNLGRTLEAIKGVRRKENYKQMVTNLLMGSTPTPDDSIKSTTATDEGVDREPLDGVVAEVQPVSGPEDAPLVADRRIDERSACVSIVEDLLERATERMMRGPVKSRGHKRKTLNTQKTEGKLTSKQIRRREYARVQELFRKHPGRAAAEVLDGECRGVRHQLSELEAYWRPVLEQVSDAPGPTPEAFRALGRDGQHGGTLDRSKMMELWLPFTPQEVKETKVNLHSAPGPDGIRPDEWRAIPAETQAEIFNYWMGQGEIPLPLRQCRTVFVPKKDVPAGPGDYRPISLASVPLRHMHAILARRLMACCPPDMRQRGFVCADGTLENSAVLDAVLGDCRKKLRECHIAVLDFSKAFDTVSHAALVSVLRKKGLPVGFCDYVARLYETAQTTLAVGNDRSDPVVVGRGVRQGDPLSPLLFNMALDVVLASLPKGVGYRLDGELVSALAYADDLVLLAGSKVGMQAAIDAVAEVGASLGLQLNREKSSVLSMVPDGKRKKPHYVTARSFKLGRRWLRQVESVERWRYLGVDMEASGAATLEHDLKQALDNNKKAPLKPQQRLEVVRLHLIPRFLHGLVLGNISDDRLRMLDVQLRHSVRQWLRLPKDVPTAYFHASTRDGGLAIPSLRTCVPDLVLRRFGKLDSSRWSVARAAFKSERIRRKLKWAERQLRKFTVETPRTGERTVVQFWRNKLHNSVDGYELRESTKVPASTKWITKKMGDMNGRDFIQCVHTHINTLPSRVRNTRGRRMGRGSELNCRAGCMVKETTAHTIQQCHRTHGGRILRHNCVADLLAKELGNSGWDVELEPRIETAAGLRKPDIVASRGGEVGVIVDVQVVSGQRPLDDAHRDKRAKYGGHGELVGKVADKLGLSKERVVATSCTISWRGVWSLGSYREMKKLLGLKESVYERIAVLAIKGSHMNWNRFNRLTTMSRHEPPD

SEQ ID NO: 33185 - protein, 842 aa, Apostictopterus fuliginosus
MRQQPPRRSMKARGKNTNTPQTRTEGKLTSRQRRRKEYARVQELYRKWPSRAAAEVLDGQCRGVRHGLEALEAYWRPVLEAVSDAPGPKPEALRALGLEEQHGGTLDRMKVSQLWAPFTADEVKGARIELRSAPGPDGIRPEEWRSVPARSKAEIFNSWMSQGAIPEPLRQCRTVFVPKTEVPAGPGEYRPISIASVPLRHMHALLARRLEACCPPDVRQRGFVCADGTLENSAVLDAVLGDCRRKLRECHMAVLDFSKAFDTVSHKALVDVLRGKGLPGAFCDYVTNLYSSATTTLAVDQELSAPIVVGRGVRQGDPLSPLLFNMAMDVVLASLPQGVGYRLEGEKVSALAYADDLVLLAGSKVGMQAALDAVASAGASMGIQLNREKSSVLSMVPDGKRKKPHYVTARSFKVGRRWLRQVDSVEHWRYLGVEMSASGSVTIEQDIKLALNNITRAPLKPQQRLEVVRTYLVPRYLHGLVLGNISDDRLRMLDIQIRHSVRQWLRLPKDVPVAYFHASTKDGGLAVPSLRTCVPDLVSRRFGKLDSSRWSVARAASRSERIIRKVRWANRQLRKFSSEKPATGERSVVQFWRDSLYASVDGKELAESTKVPASTKWIRLKAGDLSGRDYIQNVRTHINALPSRVRNTRGRRGGGVSELTCRAGCQVRETTAHTIQQCHRTHGGRIKRHNCITDFLVRELAREGWTVEQEPHIRTAVGLRKPDIIAASGDGVGVIVDAQVVSGQRPLDDAHRGKRSKYGSHGELVEKVADRLGLPSERVRVTSCTVSWRGVWSSGSYKEMKELLGLKEYVFERIAVMALKGSHTNWSRFNSSTVTCSMGETT

SEQ ID NO: 33186 - protein, 870 aa, Parnara guttata
MRTQEVDERPSCVAVVADLLERATARMTRGAKRPMTRRGVNVNTKNALVTRTDRQPNSKQRRRMEYARVQELFRKYPGRAAAEVLDGQCRGVRHSLGELEAYWRPVLEKVSDAHGPTPEVLKALRSDGQYGGTLDREKALKLWSPITVEEVKETKLKLRSAPGPDGIRPEDWRTVPAEIQAETFNHWLSLGEIPEPLRQCRTVFVPKKDAPAGPGDYRPISIASVPLRHMHAILARRLEACCPPDVRQRGFIRADGTLENSAVLDAILGDCRKKLRECHMAVLDFSKAFDTLSHAALVSVLREKGLPVGFCNYVARLYDSASTTLAVGSDRSKPVGVGRGVRQGDPLSPLLFNMALDAVLASLPKGVGYRLDGELVSALAYADDLVLLAGSKVGMQEAIGTVEQVGRMLGLQLNHEKSSVLSMVPDGKRKKPHYVTARSFKLGRRWLRQVDSVEHWRYLGVDLAVAGATSIELDVKQALTNIKKAPLKPQQRLEVVRNYLIPRFLHGLVLGNISDDRLRMLDRQIRQSVREWLRLPKDVPTAYFHASTRDGGLAVPSLRTKVPDLVVRRFGKLDSSRWSVARVASKSERICRKVKWAEKQLRKFSTESPKTGIRSVELYWRGKLHESVDGVELVETPKVPASSKWIRGRVGELSGRDYIQCVQTHINALPSKVRNTRGRRMGRESELNCRAGCMVRETTAHTIQQCHRTHGGRILRHNCIADCLVRALVGGGWTVEQEPRIETALGLRKPDIIASRSDGVGVIVDVQVVSGRHPLDDAHRGKVRKYGTHDELVEKVADRLKIAKDHVEVTSCTVSWRGVWSLGSYRDLKRLLGLKEAVYEAIARMALKGSHMNWSRFNRMTTMAPRGAPG

SEQ ID NO: 33187 - protein, 868 aa, Cecropterus bathyllus
MPLVADLRRDDRSTCVSVIEDLLARATERLMRGTVKSKRIRHNTRTRKTEVKPMNSKRRRRMEYARVQELFRKFPGRAAAEVLDGECRGVRHQLHELEAYWRPVLETVSDASGPTPEALRAARRNGQYGGTLDRLQMLKLWSPFTEEEVKEAKPDLRSAPGPDGIRPEDWRSVPARIQAEIFNSWMSQGEIPCQLRQCRTVFVPKRDEPAGPGDYRPISIASVPLRHMHALLARRLEACCPPDARQRGFIRADGTLENSAVLDAVLGDCRKKLRECHIAVLDFAKAFDTVSHAALVSVLREKGLPVGFCDYIARLYDTAQTTLAVGNDRSEPVVVGRGVRQGDPLSPLLFNMALDVVLASLPKEVGYRLEGELVSALAYADDLVLLAGSKAGMQAAIDAVAGAGESLGLQLNREKSSVLSMVPDGKRKKPHYVTTRSFKLGRRWLRQVDSVEHWRYLGVEMSVSGAATIELDIKQALENIKKAPLKPQQRLEVVRTYLIPRFLHGLVLGNISDDRLRMLDVQIRHSVRQWLRLPKDVPIGYFHASTRDGGLAIPSLRTCVPDLIIRRFGKLDSSRWAAARAASKSERIRRKVKWAVRQLRRFSAEAPRTGERTVTQYWRDKLHNSVDGFELRESTKVPASTKWITKKMGDLNGRDYIQSVHTHINALPSRVRNSRGRRLGRESELNCRAGCMVRETTAHTIQQCHRTHGGRILRHNCVAGFLAEELERAGWSVEQEPRIETAVGLRKPDIIASRGGEAGVIVDVQVVSGRRPLDDAHRDKRSKYGSHGELVEKVADRLGLTKDRVDVTSCTVSWRGVWSLGSYREMKKLLGLKETVFERIAVLTLKGSHMNWSRFNRTTTMFPLGAPD

SEQ ID NO: 33188 - protein, 952 aa, Melitaea cinxia
MARTEAQFTVDTGKYSNVDLLAKLPQLQRTLEAIKGQRRSVKYKGLVKACLEEIALSSSGPASRGSISEQPPETRPLGPPDGSTEVPPVVDKPAEAVEASLSPEAAQALESLLLRAERRKRCQGRGAKAAKRSRRTSRTDDDIAPVSISNRKRRRMEYARMQELFRKCPSRGAAEVIDGHARVVRHTLEDLETYWRPVLEEVSTALGPTRKALDALTRGEVADYSGLWAPITVEEVKASCVDSRTAAGPDGIRSEEWRAVPAPLKAEIFSNWLAKGAIPDPLRQCIFVPKKDIPAGPGDYRPISVASVPLRHMHGILAKRLLRCCPLDARQRGFVSADGALENTAVLDAVLGDSRKKLRECHVAVLGFAKAFDTVSHGALLELLKARGLPEGFLSYLAHMYETAQTTLAVNGKNSRPVKVGRGVRQGDPLSPVLFNMAMDLILASLPKGVGYGLEGEKVAALAYADDLILVAGSKVGMQESIDCVVEVGEMMGLRLNTSKSSVLSMVPDGKRKKHHYPTNRMFTVGRSKLRKVTSVERWCYLGVDFESAGTAMLELQVRKALDNITRAPLKPQQRLEIVRGHLIPRFIHGLVLGRISDDRLRMLDIEVRGAVRKWLRLPIDVPKGYFHAEAKDGGLAIPSLQAVTSELILRRYGGLASSRWAAAKAAAKSERIRKKLSWARKQVRKFTRDHPVSNLTSVSQYWREMLHASTDGHELRESSRNPASTKWIRERCMEYSGRDYVQFVHCHINALPSRVRASRGRRVGRESELSCRAGCMVRETTAHVIQQCHRTHGGRVKRHDCVTTFIAEAMTGKGWKVILEPRFTTSIGCRKPDIIASRDGVGVIVDAQVVSGQRPLDDAHREKRRKYGKHEELVQLVAEKLELPCTKSVRSTSCTISWRGVWSGASLNEMQKLLGLNRAVFETIPGMVLRGSHMNWTRFNQMTAVAAEASD

SEQ ID NO: 33189 - protein, 954 aa, Melitaea cinxia
MARTEAQFTVDTGKYSNVDLLAKLPQLQRTLEAIKGQRRSVKYKGLVKACLEEIALSSSGPASRGSISEQPPETRLLGPPDGSTEVSPVVDKPAEAVEASLSPEAAQALESLLLRAERRKRCQGRGAKAAKRSRRTSRTDDDIAPVSISNRKRRRMEYARMQELFRKCPSRGAAEVIDGHARVVRHTLEDLETYWRPVLEEVSTALGPTRKALDALTRGEVADYSGLWAPITVEEVKASCVDSRTAAGPDGIRSEEWRAVPAPLKAEIFSNWLAKGAIPDPLRQCRTIFVPKKDIAAGPGDYRPISVASVPLRHMHGILAKRLLRCCPLDARQRGFVSADGALENTAVLDAVLGDSRKKLRECHVAVLGFAKAFDTVSHGALLELLKARGLPEGFLSYLAHMYETAQTTLAVNGKNSRPVKVGRGVRQGDPLSPVLFNMAMDLILASLPKGVGYGLEGEKVAALAYADDLILVAGSKVGMQESIDCVVEVGEMMGLRVNTSKSSVLSMVPDGKRKKHHYPTNRMFTVGRSKLRKVTSVERWRYLGVDFESAGTAMLELQVRKALDNITRAPLKPQQRLEIVRGHLIPRFIHGLVLGRISDDRLRMLDIEVRGAVRKWLRLPIDVPKGYFLAEAKDGGLAIPSLQAVTPELILRRYGGLASSRWAAAKAAAKSERIRKKLSWARKQVRKFTRDHPVSNLTSVSQYWREMLHASTDGHELRESSRNPASTKWIRERCMEYSGRDYVQFVHCHINALPSRVRASRGRRDGRESELSCRAGCMVRETTAHVIQQCHRTHGGRVKRHDCVTRFIAEAMTGKGWKVILEPRFTTSIGCRKPDIIASRDGVGVIVDAQVVSGQRPLDDAHREKRRKYGKHEELVQLVAEKLELPCTKSVRSTSCTISWRGVWSGASLNEMQKLLGLNRAVFETIPGMVLRGSHMNWTRFNQMTAVAAEASD

SEQ ID NO: 33190 - protein, 1048 aa, Boloria selene
MEHNRKRKVDHPDLPQESGSGQNPTSSARSGDHDMNVGESSDFDCPHCGRSFKTKTGLGVHKRRAHPVEANVEAAPKGEKRRWHEEEVHLLARTEAQLTKEFGKCSGADLLAKLPQLQRTLEAVKGKRRGADYKRLVKTFLEESRSPAPLPSASGGRSTDHSGVAQPMSVQEKGVSEDVPPADEPQAAVRAPMSSNAERALARLLQVAEKRRKRCGLGARAARRLHLHGVDGCALESLSSKKRRRAEYARVQELFRKCPGRIATEVITGQSREVKHSLEELEAFWRPILEEVSEAPGPSEDYLRALRLARAEEGANVYDRAWRPISVEEVEAANIDLQTAPGPDGIRSDEWRSVPSTLKAEMFNYWMAIGETPDQLRQSRTIFVPKTDAPQRPSDYRPISIASVPLRHLHTILARRLLDCCPPDTRQRGFIHADGTLENTAVLDAVLGDSRRKLRECHVAVLDFSRAFDTVSHKALLELLRAKGMPHGLCEYMARLYETATTTLAVTGKYSQPVKVGRGVRQGDPLSPILFNMAMDGILASLPKGVGYGLEGERVSALAYADDLILLAGSKVGMQESIDCVVRAGETVGLFVNRSKSSVLSMVPDGHRKKHHYPTESLFSVGRKKLRQVTCVERWRYLGVDFDSAGCATLEQEVSNALNNISRAPLKPQQRLELVRGHLIPRFMHGLVLGKISDDRLRMLDVQIRGAVRKWLRLPADVPVGYFHASVKDGGLGVPSFRVVVPAIIERRYGGLARSSWPAATAAARSDRIRKKVKWARRLLRKFGMSGPDDLTSVAKYWREKLHASTDGFELRESSRVPASTEWIRKRSGQFTGRDYVQFVHCHINALPSRVRVSRGRRDGVDIKCRAGCVENETTAHTIQRCFRTHGGRIERHNFVTRVVAEAMTQRGWSVELEPKITTALGHRKPDVIAVRDGVGIILDTQVVSGQRPLDDAHRVKRNKYGKHEELVKKVAGRLGLPSSECVRSTTCTISWRGVWSSSSVKEMKELLGLNNSVFGLIPSLVLRGSHTNWTRFNQMTSHINSWTPDRV

SEQ ID NO: 33191 - protein, 1040 aa, Fabriciana adippe
MDHPDLPRESGSGQLPSSSARPDDRDLNVGESSDFDCPLCGRSFKTKTGLGVHKRRAHPAEANVEAAPKGVKRRWLEEEVLLLARTEAQLTKETGKCSGTDLHAKLPQLQRTLEAVKGKRRGADYKRLVDTLLEESSSPAPVPSASGCRSAERSGVAQSPGVQDEGVSEDVSPADEPHTAVRASISPNAEQALSKLLRVAERRRKRCGLGARAARRLHLNGIDGCALESMSSRKRRRAEYARVQELFRKCPGRLAAEVITGQSRGVKHSLEELEAFWRPILEEVSEAPGPTEVSLRALRQARGAEGADVFDRLWQPISVDEVKATNVDLQTAPGPDGIRSDEWRSVPNQLKAEMFNFWMAVGEIPDQLRQSRTIFVAKTDAPKQPSDYRPISIASVPLRHLHTILARRLLDCCPPDVRQRGFIHADGTLENTAVLDAVLGDSRRKLRECHVAVLDFSRAFDTVSHKALLELLGARGLPKGFCDYLARMYETATTILAVNGKQGQPVKVGRGVRQGDPLSPILFNMAMDGILASLPKGVGYGLEGERVSALAYADDLILLAGSKVGMQESIDCVVRSGEAVGLFVNRSKSSVLSMVPDGHRKKHHYPTENLFSIGRKKLRQVTCVERWRYLGVDFDSSGSATFEQEVCKALDNISRAPLKPQQRLELVRGHLIPKFMHGLVLGQISDDRLRMLDVRIRGAVRKWLRLPADVPVGYYHASVKDGGLGVPSFRVVVPAIIERRYGGLAESNWPAASAAARTDRIRRKLRWARRLLRKFGMTSADDLTSVAKYWREKLHASTDGFELRESSRVPASTEWIRKRSGQLAGRDYVQSVHCHINALPSRIRASRGRRDDVDTKCRAGCVESETTAHIIQRCFRTHGGRIKRHDFVTRVVAEAMTRRGWSVELEPRIATSLGHRKPDVIAVRDGVGVILDTQVVSGQRPLDDAHRAKRSKYGKHEELVKKVAGRLGLPSAECVRSTSCTISWRGVWSASSVKEMKELLGLDNSVFGLIPSLVLRGSHTNWTRFNQMTSRITSWTPDRA

SEQ ID NO: 33192 - protein, 1109 aa, Elymnias hypermnestra
MSLIKNWDRPDLPQESFPVAGFTAQHYGNICKCNGSHKELGPSRPPTGVGVHGEIFLGGSTQQLGNPDVSAGQPDEWTCPMCGRRSDVSAGSAGQPDEWTCPVCGRGFSTKTGLGVHKRRAHPVEANAEAAPSQVKRRWRDEELLLLARTEAQLTFETGTCTNVDLLAKLPQLQRTLEAIKGQRRAVKYKRMVETALEDLATTEAEPEASGGSSDEQLEVAQPEVVQEECFEAVPPAVDPHSANTAPISADAAQVVTDLLARAEARKQRRGLGARIARRLRCTKMFDVNDTTNAPEKLTRKKQRRIEYARMQELFRKCPGRAAAEVLDGQCRGVRQSMQEMEAYWRPILEAESNASGPSPKALRALRRKEAESGGGRDYTKLWTPITVEEVKASRVDPRTAPGPDDIRAGDWRPVPAPIKAEIFNAWLTAGEIPEPLRQSRTIFVPKSEEPKCPSDYRPISIASIPLRHFHSILARRLLDCCPPDTRQRGFICADGTLENTAVLDAVLGDSRKKLRECHVAVLDFSKAFDTVSHKALVELLRARGLPEEFCGYIARLYNTAHTTLAVNENRSKPVKVGKGVRQGDPLSPVLFNMAMDLILASLPSGVGYGLEAERVSALAYADDLVLLAGSKVGMQESIDCVVGAGELLGLRVNQAKSSVLSMVPDGHRKKHHFLTEKTFSIGRKKLRQVSCVERWRYLGVEFTSSGTSTIEHDVKTALSNITKAPLKPQQRLEIVRGHLVPRFLHGLVLGTISDDRLRMMDVMIRGAVRKWLRLPNDVPVAYFHAAIKDGGLAIPSLRTMVPDLIVRRYGALSSSQWPVAKAAARSDRISKKLRWAVRQLKRFTRNNNGTSETSVTEYWRGKLHESVDGLELRESSKVPESTKWMRGLTGAYSGRDFVQFVHCHINALPSRIRVSRGRRYGRESEFNCRAGCMVRETTAHTIQQCHRTHGGRIERHNFVNKYIAEAMANKGWLVELEPRFVTSQGVRKPDIIAVRDGVGVILDTQVVSGQRSLDEAHRAKRSKYGTHEELVEMIAGKLGLPNPGSVRSTSCTISWRGVWSRSSVKDLKELLGLASQTLERVPGFVLRGSHINWTRFNQMTAVMAEFSD

SEQ ID NO: 33193 - protein, 1029 aa, Pararge aegeria
MVNSSSAAQPGASGESVGSAGRASEWNCPSCGRGFRTKTGLGVHRRRAHPVEANAEAAPSQVKRRWLDEELDLLARTEALLTLEASGPCTNVALAARLPQLHRTLEAIKGQRRAAKYKGMVKTHLAYLVAQKAADDAGASSSVDASVSAQESGEVESADADDQAPVVQTPISVDAARALSDLLAGAEARIRRGGLGARAARHLRHTKRHGFLNEPIALDSLSNRKRRRMEYARVQELFRKCPGRAAAEVIDGHCRETKHSLEEMEAYWRPILEAVSNAPGPTPESLRELRPPSDGTHDYSKLWAPITEQEVKASRVDPKTAPGPDGIRAADWSRVSVPLKAEIFNHWMTSGEIPEPLRQCRTVFVPKSDAPQNPGEYRPISIASVPLRHMHSILARRLLDCCPPDTRQRGFVCADGTVENTAVLDAVLGDSRKKLRECHMAVLDFSKAFDTVSHAALVELLRARGLPGAFCSYIARLYETAHTTLAVKNKLSEPVKVGRGVRQGDPLSPILFNMAMDLILANLPSGVGYGLESERVSALAYADDLVLLAGSKVGMQESIDCVARFGDMVGLRINFGKSSVLSMVPDGHRKKHHYLTEKTFSIGRRKLRQVSCVERWRYLGVDFEASGSKTIEHDVKIALNNISKAPLKPQQRLEILRGYLVPRFMHGFVLGTISDDRLRRLDVQIRGAVRKWLRLPHDVPVAYYHAAIKDGGLAIPSLRTVVPDLIVRRFGALGSSQWVAARAAARSTRIRNKLRWARRQQEKFTRKASERDTPCVAQYWREGLHASTDGLELRESSRNPASTKWIRERCMEYSGRDFVQFVHCHINGLPSRVRVTRGRREGRESQLICRAGCVVRETAAHTIQQCFRTHGGRIERHNCVARFVANAMTQQGWKVEHEPRFVTSLGVRKPDIIAVRGAAGVILDAQVVSGQRSLDEAHRAKRSKYGSHAELVRLVAGRLGLPSPDCVRTTTCTISWRGVWSHSSVKEMKDILGLPCHVFERVPGLVLRGSHMNWVRFNQMTAVSTASPH

SEQ ID NO: 33194 - protein, 1088 aa, Eueides isabella
MGGKPPSLSASSEGTHECRGRTRWLGLQPGHQRVKLTAKPIYKEKKDKVDRPDLPQESGHGQNPSPSVEPGAAAANPGPSEGCACPICGRTFRTKAGLGQHKRKAHPVEANAEAAPSEVKRRWRDEEVLLMVRTEAQLTREVGKCTGRDLHARLPQLQRTLEAVKGKRRAADYKGKVKAFLEEMSLEALVPTASGCPSTDHHSLPALPTIARFTEVPSEDALPAGEPDTAALAIGPRAERILSRLLKVAARRMKRCGLRAKAARRLCQNKEETALEKMSSRKRRRAEYARVQELYRKSTGRVAAEIISGQCRGVNHTLKELKAYWRPILEQVPEVPGPSAESLRAVRRAAGAEEPRFDSLWKPISVDEIKAVRIDPESAPGPDGIRADEWRSVPIPVKAEMFNSWLMSGEIPEPLRQCRTIFVPKVDTSKQPSEYRPISIASVPLRHLHAILARRLLDCCPPDARQRGFVHTDGTLENTAVLDAVLGDSRRKLRECHVAVLDFSKAFDTVSHKALLELLGARGLPGKFVEYLARLYETATTTLAVKGSYCQTVKVGRGVRQGDPLSPVLFNLAMDVILASLPKGVGYGLEGERTSALAYADDLVLLAGSKVGMQESIDCVVRTGELLGLYVNRSKSSVLSMVPDGHRKKHHFLTEGVFTIGKRKLRQVSCVERWRYLVLDFDSSGVMTLEQEVSNALSNITKAPLKPQQRLEIVMGHLVPRFLHGLVLGKISDDRLRMLDVTIRGAVKRWLRLPADVPLAYFHASVRGGGLGLPSLRTMVPAVIAKRYGRLTESSWPAASAAARSDRVRKKLKWARKLLSKFGASGPDDTTSVVRYWREKLHASTDGFELRESSRHPASTKWIRERCGQLSARDYVQFVHCHINALPSRVRVSRGRRVGQGANIRCRAGCMVSETTAHIIQQCHRTHGGRIKRHDLVTRVVAEAMTKRGWSVELESRLATSLGLRKPDLVAAKGGVGVILDTQVVSGSRPLDDSHRAKRTKYGGNAEVVELVAGKLGLPAENVRATSCTISWRGVWSAASLREMQSLLGLDRALFGLIPSLVLRGSHMNWTRYNQMTGTIAGATTDSA

SEQ ID NO: 33195 - protein, 1045 aa, Heliconius hecale
MDPTKKIVDHPDLPQESGSGQNPSSTTQPGATVVNPGSSEGWICPICGRSFRTKAGLGQHKRKAHPVEANVEAAPNEVKRRWREEEVLLLARTEAQLTKENGNCTGRDLHAQLPQLHRTLEAVKGKRRGADYKGLVKTFLEELSLPAPDPIASGCPCLDPHSQPAQLTRVEESSEDVPPAGEPIPVVRAKISPNAERTLSRLLKVAEGRRKRCGLGAKAARRLHRDTLQTEEALETISSRKRRRIEYARVQELFRKSTGRIAAEIITGQSRGVKHSLAELEAYWRPILEEVSEAPGPTAESLRAVRQAAGAESPCFESLWQPISVNEVKAVKVDLETASGPDGIRADDWRSVPIPVKAEIFNSWLMSGEIPEPLRQCRTIFVPKVDTPKHPSDYRPISIASVPLRHLHAILARRLLDCCPPDTRQRGFVHTDGTLENTAVLDAVLGDSRRKLRECHVAVLDFSKAFDTVSHKALVELLGARGLPTKFCEYMARLYNTATTILAVQGKYSQPVRVGRGVRQGDPLSPVLFNLAMDVILASLPKGVGYGLEGERTSALAYADDLVLLAGSRVGMQESIDCVVRTGETLGLYVNRSKSSVLSMVPDGHRKKHHFLTQSTFSVGRKKLRQVSCVERWRYLGVDFDSSGTVTIEHEVSKALTNISKAPLKPQQRLEIVRGHLVPKFLHGLVLGTISDDRLRMLDVQIRGAVKKWLRLPADVPLGYYYASVRDGGLGLPCLRTMVPTVIARRYGRLAESNWPAAAAAARTDRVRRKLKWARKLLSKFGITSPDDTTSVAKFWREKLHTSTDGFELRESSRHPDSTKWIRERCGQLSGRDFVQFVHCHINALPSRMRVSRGRRIGQGADQRCRAGCMVSETTAHVIQQCHRTHGGRIKRHDLVTRVVAEAMTKRGWKVELEPRLVTSLGLRKPDLIGSKGGVGVILDTQVVSGSRPLDDAHRAKRSKYGRNEELVEMVAGRLGLPAGSVRTTSCTISWRGVWSAASLREMQTLLELERNVYGVIPCLVLRGSHMNWSRFNQMTSTITTATPD

SEQ ID NO: 33196 - protein, 905 aa, Eueides isabella
MARTEAQLTREVGKCTGRDLHARLPQLQRTLEAVKGKRRAADYKGKVKAFLEEMSLEALVPTASGCPSTDHHSLPALPTIAGITEVPSEDALPAGEPDTAALAIGPRAEWILSRLLKVAARRMKRCGLRAKAARRLCQNKDETALEKMSSRKRRRAEYARVQELYRKSTGRVAAEIISGQCRGVNHTLKELEAYWRPILEQVSEAPGPSAESLRAVRRAAGAEEPRFDSLWKPISVDEIKAVRIDPESAPGPDGIRADEWRSVPIPVKAEMFNSWLMSGEIPEPLRQCRTIFVPKVDTPKQPREYRPISIASVPLRHLHAILARRLLDCCPPDARQRGFVHTDGTLENTAVLDAVLGDSRRKLRECHVAVLDFSKAFDTVSHKALLELLGARGLPGKFVEYLARLYETATTTLAVKGSYSQTVKVGRGVRQGDPLSPVLFNLAMDVILASLPKGVGYGLEGERTSALTYADDLVLLAGSKVGMQESIDCVVRTGEQLGLYVNRSKSSVLSMVPDGHRKKHHFLTESVFTIGKKKLRQVSCVERWRYLGLDFDSSGVMTLEQEVSNALNNITKAPLKPQQRLEIVMGHLVPRFLHGLVLGKISDDRLRMLDVTIRGAVKRWLRLPADVPLAYFHASVRDGGLGLPSLRTMVPAVIAKRYGRLTESSWPAASAAARSDRVRKTLKWARKLLSKFGASGPDDTTSVVRYWREKLHASTDGFELRESSRHPASTKWIRERCGQLSARDYVQFVHCHINALPSRVRVSRGRRVGQGANIRCRAGCMVNETTAHIIQQCHRTHGGRIKRHDLVTRVVAEAMTKRGWSVELESRLATSLGLRKPDLVAAKGGVGVILDTQVVSGSRPLDDSHRAKRTKYGGNAEVVELVAGKLGLPAENVRATSCTISWRGV

SEQ ID NO: 33197 - protein, 1045 aa, Heliconius melpomene
MDHNRNIMDHPDLPQESGSGQNPSSTTQPGATVVNPGSSEGWICPICGRSFRTKAGLGQHKRKAHPVEANVEAAPNEVKRRWREEEVLLLARTEAQLTKENGNCTGRDLHAQLPQLHRTLEAVKGKRRGADYKGLVKTFLEELSLNAPDPIASGCPCLDLHSQPAQPTRVEEPSEDVPPAGEPIPVVRAKISPNAERTLSRLLKVAEGRRKRCGLGAKAARRLHRDTLQTEVALETISSRKRRRIEYARVQELFRKSTGRIAAEIITGQSRGVKHSLAELEAYWRPILEEVSEAPGPTAESLRAVRQAAGAERPCFESLWQPISVNEVKAVKVDLETASGPDGIRADDWRSVPIPVKAEIFNSWMMSGEIPEPLRQCRTIFVPKVDTPKQPSDYRPISIASVPLRHLHAILARRLLDCCPPDTRQRGFVHTDGTLENTAVLDAVLGDSRRKLRECHVAVLDFSKAFDTVSHKALVELLGARGLPTKFCEYMARLYNTATTILAVQGKYSQPVRVGRGVRQGDPLSPVLFNLAMDVILASLPKGVGYGLEGERTSALAYADDLVLLAGSRVGMQESIDCVVRTGETLGLYVNRSKSSVLSMVPDGHRKKHHFLTQSTFSVGRKKLRQVSCVERWRYLGVDFDSSGTVTIEHEVSKALTNISKAPLKPQQRLEIVRGHLVPKFLHGLVLGTISDDRLRMLDVQIRGAVKKWLRLPADVPLGYYYASVRDGGLGMPCLRTMVPTVIVRRYGGLAESSWPAAAAAARTDRVRRKLKWARKLLSKFGITSPDDTTSVAKFWREKLHTSTDGFELRESSRHPDSTKWIRERCGQLSGRDFVQFVHCHINALPSRMRVSRGRRIGQGADQRCRAGCMVSETTAHVIQQCHRTHGGRIKRHDLVTRVVAEAMTKRGWKVELEPRLVTSLGLRKPDLIGSKGGVGVILDTQVVSGSRPLDDAHRAKRSKYGRNDELVEMVAGRLGLPAESVRTTSCTISWRGVWSAASLREMQTLLELERNVYGVIPCLVLRGSHMNWSRFNQMTSTITTATPD

SEQ ID NO: 33198 - protein, 1045 aa, Heliconius cydno
MDPNRNIMDHPDLPQESGSGQNPSSTTQPGATVVNPGSSEGWICPICGRSFRTKAGLGQHKRKAHPVEANVEAAPNEVKRRWREEEVLLLARTEAQLTKENGNCTGRDLHAQLPQLHRTLEAVKGKRRGADYKGLVKTFLEELSLPAPDPIASGCPCLDPHSQPAQPTRVEEPSEDVPPAGEPIPVVRAKISPNAERTLSRLLKVAEGRRKRCGLGAKAARRLHRDTLQTEEALETISSRKRRRIEYARVQELFRKSTGRIAAEIITGQSRGVKHSLAELEAYWRPILEEVSEAPGPTAESLRAVRQAAGAERPCFESLWQPISVNEVKAVKVDLETASGPDGIRADDWRSVPIPVKAEIFNSWLMSGEIPEPLRQCRTIFVPKVDTPKQPSDYRPISIASVPLRHLHAILARRLLDCCPPDTRQRGFVHTDGTLENTAVLDAVLGDSRRKLRECHVAVLDFSKAFDTVSHKALVELLGARGLPTKFCEYMARLYNTATTILAVQGKYSQPVRVGRGVRQGDPLSPVLFNLAMDVILASLPKGVGYGLEGERTSALAYADDLVLLAGSRVGMQESIDCVVRTGETLGLYVNRSKSSVLSMVPDGHRKKHHFLTQSTFSVGRKKLRQVSCVERWRYLGVDFDSSGTVTIEHEVSKALTNISKAPLKPQQRLEIVRGHLVPKFLHGLVLGTISDDRLRMLDVQIRGAVKKWLRLPADVPLGYYYASVRDGGLGLPCLRTMVPTVIARRYGRLAESNWPAAAAAARTDRVRRKLKWARKLLSKFGITSPDDTTSVAKFWREKLHTSTDGFELRESSRHPDSTKWIRERCGQLSGRDFVQFVHCHINALPSRMRVSRGRRIGQGADQRCRAGCMVSETTAHVIQQCHRTHGGRIKRHDLVTRVVAEAMTKRGWKVELEPRLVTSLGLRKPDLIGSKGGVGVILDTQVVSGSRPLDDAHRAKRSKYGRNEELVEMVAGRLGLPAGSVRTTSCTISWRGVWSAASLREMQTLLELERNVYGVIPCLVLRGSHMNWSRFNQMTSTITTATPD

SEQ ID NO: 33199 - protein, 1045 aa, Heliconius besckei
MDPIKKIVDHPDLPQESGSGQNPSSTTQPGATVVNLGSSEGWICPICGRSFRTKAGLGQHKRKAHPVEANVEAAPNEVKRRWREEEVLLLARTEAQLTKENGNCTGRDLHAQLPQLHRTLEAVKGKRRGADYKGLVKTFLEELSLPAPDPIASGCPCPDLHSQPAQPTRVEVSSEDVPPAGEPTPVVRANISPNAERTLSRLLKVAEGRRKRCGLGAKAARRLHRDTLQTEEALETISSRKRRRIEYARVQELFRKSTGRIAAEIITGQSRGVKHSLAELEAYWRPILEEVSEAPGPTAESLRAVRQAAGAERPCFESLWQPISVNEVKAVKVDLETASGPDGIRADDWRSVPIPVKAEIFNSWLMSGEIPEPLRQCRTIFVPKVDTPKQPSDYRPISIASVPLRHLHAILARRLLDCCPPDTRQRGFVHTDGTLENTAVLDAVLGDSRRKLRECHVAVLDFSKAFDTVSHKALVELLGARGLPTKFCEYMARLYNTATTILAVQGKYSQPVRVGRGVRQGDPLSPVLFNLAMDVILASLPKGVGYGLEGERTSALAYADDLVLLAGSRVGMQESIDCVVRTGETLGLYVNRSKSSVLSMVPDGHRKKHHFLTQSTFSVGRKKLRQVSCVERWRYLGVDFDSSGTVTIEHEVSKALTNISKAPLKPQQRLEIVRGHLVPKFLHGLVLGTISDDRLRMLDVQIRGAVKKWLRLPADVPLGYYYASVRDGGLGLPCLRTMVPTVIARRYGRLAESNWPAAAAAARTDRVRRKLKWARKLLSKFGITSPDDTTSVAKFWREKLHTSTDGFELRESSRHPDSTKWIRERCGRLSGRDFVQFVHCHINALPSRMRVSRGRRIGQGADQRCRAGCMVSETTAHVIQQCHRTHGGRIKRHDLVTRVVAEAMTKRGWKVELEPRLVTSLGLRKPDLIGSKGGVGVILDTQVVSGSRPLDDAHRAKRSKYGRNEELVEMVAGRLGLPAGSVRTTSCTISWRGVWSAASLREMQTLLELERNVYGVIPCLVLRGSHMNWSRFNQMTSTITTATPD

SEQ ID NO: 33200 - protein, 904 aa, Eueides isabella
MSLEASVPTASGCPDTNRHSLSALPPHAGTSEATSEDVPSAGEPDTAVGAIGPKAERILSRLLKVAKGRMKRCGLGAKMARRLCQHKADGDALEKMSSRRRRRIEYARVQELYRKCTGRAAAEVISGQCRGMKHTLKELEAYWRPILEKVSEAPGPSAESLRAVRRVAGAEEPCYDSLWKPITSDEVKAVRIDPNSAPGPDGIRADEWRSVPMPVKAEIFNSWMVSGGIPEPLRQCRTIFVPKNDTPSQPSEYRPISIASVPLRHLHAILARRLLDCSPPDTRQRGFVHADGTLENTAVLDAVLGDSRRKLRECHVAVLDFSKAFDTVSHKALIELLGARGLPREFVDYMARLYETATTTLAVKGKYSQTVRVGRGVRQGDPLSPVLFNLAMDVILASLPKGVGYGLEGERTSALAYADDLVLLAGSKVGMQESIDCVVRTGEQLGLYINRSKSSVLSMVPDGHRKKHHYLTEGVFTVGKRKLRQVSCVERWRYLGIDFNSSGTVTLEHEVSNALNNITKAPLKPQQRLEIVRGHLVPRFLHGLVLGKVSDDRLRMLDVMIRGAVKKWLRLPADVPLGYYHASVRDGGLGLPSLRTMVPAVIAKRYGRLAESSWPAASAAARTDKIRKKLKWARKQLSKFGASGPDDTTSVVRFWREKLHASTDGFELRESSRHPDSTKWIRERCGQLSGRDFVQFVHCHINALPSRVRVSRGRRDGQEANLRCRAGCMVRETTAHAIQQCHRTHGGRIKRHDLITRVVAEAMTKRGWSVELEPKLATSLGLRKPDLIAAKGGVGVILDTQVVSGSRPLDDSHRSKRSKYGRNVEVVELVAGRLGLPAENVRATSCTISWRGVWSAASLREMQELLGVEKALFGGIPSLVLRGSHMNWTRFNQMTTTIAWVTPD

SEQ ID NO: 33201 - protein, 680 aa, Heliconius cydno
MSGEIPEPLRQCRTIFVPKVDTPKQPSDYRPISIASVPLRHLHAILARRLLDCCPPDTRQRGFVHTDGTLENTAVLDAVLGDSRRKLRECHVAVLDFSKAFDTVSHKALVELLGARGLPTKFCEYMARLYNTATTILAVQGKYSQPVRVGRGVRQGDPLSPVLFNLAMDVILASLPKGVGYGLEGERTSALAYADDLVLLAGSRVGMQESIDCVVRTGETLGLYVNRSKSSVLSMVPDGHRKKHHFLTQSTFSVGRKKLRQVSCVERWRYLGVDFDSSGTVTIEHEVSKALTNISKAPLKPQQRLEIVRGHLVPKFLHGLVLGTISDDRLRMLDVQIRGAVKKWLRLPADVPLGYYYASVRDGGLGLPCLRTMVPTVIARRYGRLAESNWPAAAAAARTDRVRRKLKWARKLLSKFGITSPDDTTSVAKFWREKLHTSTDGFELRESSRHPDSTKWIRERCGQLSGRDFVQFVHCHINALPSRMRVSRGRRIGQGADQRCRAGCMVSETTAHVIQQCHRTHGGRIKRHDLVTRVVAEAMTKRGWKVELEPRLVTSLGLRKPDLIGSKGGVGVILDTQVVSGSRPLDDAHRAKRSKYGRNEELVEMVAGRLGLPAGSVRTTSCTISWRGVWSAASLREMQTLLELERNVYGVIPCLVLRGSHMNWSRFNQMTSTITTATPD

SEQ ID NO: 33202 - protein, 1045 aa, Heliconius cydno; identical to SEQ ID NO: 33198

SEQ ID NO: 33203 - protein, 1025 aa, Heliconius pardalinus
MDHNRNIMDHPDLPQESGSGQNPSSTTQPGATVVNLGSSEGWICPICGRSFRTKAGLGQHKRKAHPVEANVEAAPNEVKRRWRDEEVLLLARTEAQLTKENGNCTGRDLHAQLPQLHRTLEAVKGKRRGADYKGLVKTFLEELSLNAPDPIASGCPCLDPHSQPAQPTRVEESSEDVPPAGEPIPVVRAKISPNAERTLSRLLKVAEGRRKRCGLGAKAARRLHRDTLQTEEALETISSRKRRRIEYARVQELFRKSTGRIAAEIITGQSRGVKHSLAELEAYWRPILEEVSEAPGPTAESLRAVRQAAGAERPCFESLWQPISVNEVKAVKVDLETASGPDGIRADDWRSVPIPVKAEIFNSWLMSGEIPEPLRQCRTIFVPKVDTPKHPSDYRPISIASVPLRHLHAILARRLLDCCPPDTRQRGFVHTDGTLENTAVLDAVLGDSRRKLRECHVAVLDFSKAFDTVSHKALVELLGARGLPTKFCEYMARLYNTATTILAVQGKYSQPVRVGRGVRQGDPLSPVLFNLAMDVILASLPKGVGYGLEGERTSALAYADDLVLLAGSRVGMQESIDCVVRTGETLGLYVNRSKSSVLSMVPDGHRKKHHFLTQSTFSVGRKKLRQVSCVERWRYLGVDFDSSGTVTIEHEVSKALTNISKAPLKPQQRLEIVRGHLVPKFLHGLVLGTISDDRLRMLDVQIRGAVKKWLRLPADVPLGYYYASVRDGGLGLPCLRTMVPTVIARRYGRLAESNWPAAAAAARTDRVRRKLKWARKLLSKFGITSPDDTTSGAKFWREKLHTSTDGFELRESSRHPDSTKWIRERCGQLSGRDFVQFVHCHINALPSRIRVSRGRRIGQGADQRCRAGCMVSETTAHVIQQCHRTHGGRIKRHDLVTRVVAEAMTKRGWKVELEPRLVTSLGLRKPDLIGSKGGVGVILDTQVVSGSRPLDDAHRAKRSKYGRHEELVEMVAGRLGLPAGSVRTTSCTISWRGVWSAASLREMQTLLELERNVYGVIPCLVLRGS

SEQ ID NO: 33204 - protein, 1045 aa, Heliconius heurippa
MDPNRNIMDHPDLPQESGSGQNPSSTTQPGATVVNLGSSEGWICPICGRSFRTKAGLGQHKRKAHPVEANVEAAPNEVKRRWREEEVLLLARTEAQLTKENGNCTGRDLHAQLPQLHRTLEAVKGKRRGADYKGLVKTFLEELSLPAPDPIASGCPCLDPHSQPAQPTRVEESSEDVPPAGEPIPVVRAKISPNAERTLSRLLKVAEGRRKRCGLGAKAARRLHRDTLQTEEALETISSRKRRRIEYARVQELFRKSTGRIAAEIITGQSRGVKHSLAELEAYWRPILEEVSEAPGPTAESLRAVRQAAGAERPCFESLWQPISVNEVKAVKVDLETASGPDGIRADDWRSVPIPVKAEIFNSWLMSGEIPEPLRQCRTIFVPKVDTPKQPSDYRPISIASVPLRHLHAILARRLLDCCPPDTRQRGFVHTDGTLENTAVLDAVLGDSRRKLRECHVAVLDFSKAFDTVSHKALVELLGARGLPAKFCEYMARLYNTATTILAVQGKYSQPVRVGRGVRQGDPLSPVLFNLAMDVILASLPKGVGYGLEGERTSALAYADDLVLLAGSRVGMQESIDCVVRTGETLGLYVNRSKSSVLSMVPDGHRKKHHFLTQSTFSVGRKKLRQVSCVERWRYLGVDFDSSGTVTIEHEVSKALTNISKAPLKPQQRLEIVRGHLVPKFLHGLVLGTISDDRLRMLDVQIRGAVKKWLRLPADVPLGYYYASVRDGGLGLPCLRTMVPTVIARRYGRLAESNWPAAAAAARTDRVRRKLKWARKLLSKFGITSPDDTTSVAKFWREKLHTSTDGFELRESSRHPDSTKWIRERCGQLSGRDFVQFVHCHINALPSRMRVSRGRRIGQGADQRCRAGCMVSETTAHVIQQCHRTHGGRIKRHDLVTRVVAEAMTKRGWKVELEPRLVTSLGLRKPDLIGSKGGVGVILDTQVVSGSRPLDDAHRAKRSKYGRNEELVEMVAGRLGLPAGSVRTTSCTISWRGVWSAASLREMQTLLELERNVYGVIPCLVLRGSHMNWSRFNQMTSTITTATPD

SEQ ID NO: 33205 - protein, 1045 aa, Heliconius hecale; identical to SEQ ID NO: 33195

SEQ ID NO: 33206 - protein, 992 aa, Enchytraeus crypticus
MPARQTWPLSQTANKKTGICSVCLAQRQLHSGDGKVHLHGPLDNRCPGSNQPPLQISAQAAASQPGLAVSDIRNKIRNRSCDSGSARQSSPPTAAPNSANLSRNSFSSQPLILEHPCLSRPTIKHIPKSARPACSAALIDAFRKIESDPSVLLYWSDLLLFASSVLQVPARTGKRHNLSSLIKKRLEGLGTSAPTEPVVERIKRAHHSHDSRASAVRSKMEDGNVSAAVRILCSDESPAQCNLNTFNILKAKHPPAASSSIMAPLPDSMETPPIQVSEQDVVKAVRSFPAGSAGGPDGLRPQHLLELVTCRESAGTFLTALTSFVNLLLRGVCPPEVQPVLFGGKLFALNKKSGGIRPIAVGYTWRRLAAKCANRYAVSALSEYLSPIQLGAGIPGGCEAAVHATRRFAESMPADHFVVKLDFCNAFNCLSRSRMLSEIHHRIPELYSFCHLAYSSPSWLKFGDWCIESQEGVQQGDPLGPMLFCLTIHPLLTSLSSDLTVGYLDDITLGGCESSIANDVRTIIDRGQEFGLQLNRTKCEVISSVCKSPGNSVLSSFVPMCLSHSSLLGAPLSGEEATTTALSSRLEDLKRTASRLKSLAAHDALTILRFSLSAPKLMHVLRSSPSFSNPRLLDYDEALRQCLCAVINADLSDLQWQQASLPVSMGGLGIRLVSHIAPSAFLASAMGTRQLQDAILHKCSLSADSSIDVALSVWSKSLTSSAPPSTSVSSQKSWDRPIVDRIYNSLLESQSNAVDRARLLAVSTKRSSDWLHALPVASCGLFLDNEAIRVAVSFRLGAKTCEPHMCPCGHEVDALGLHGLSCKRSSGRMSRHHNLNDIIWRALSRAGIPSYKEPSGLSRSDGKRPDGMTLVPWCNGKCAVWDVTVIDTMANSYLNTTSVTAGGAAVHAASRKLDKYRDLSLGYEVVFPVAIETMGPMNPEGVDFINGIGRLIAEQTGDKRETSFLWQRLSMTLQRFNAVCFNNSFKPIDDLE

SEQ ID NO: 33207 - protein, 991 aa, Enchytraeus crypticus
MPARQTWPLSQTANKKTGICSVCLAQRQLHSGDGKVHLHGPLDNRCPGSNQPPLQISAQAAASQPGLAVSDIRNRIRNRSCDSGSARQSSPPTAAPNSANLSPNSFSSQPLILEHPCLSRPTIKHIPKSARPACSAALIDAFRKIECDPSVLSYWSDLLLFASSVLQVPARTGKRHNLSSLIKKRLEGLGTSAPTEPVVERIKRAHHSHDSRASAVRSKMEDGNVSAAVRILCSDESPAQCTINTFNILKAKHPPAASSSIMAPLPDSMATPPIQVSEQDVVKAVRSFPAGSAGGPDGLRPQHLLELVTCRESAGTFLTALTSFVNLLLRGACPPEVQPVLFGGKLFALNKKSGGIRPIAVGYTWRRLAAKCANRYAVSALSEYLSPIQLGAGIPGGCEAAVHATRRFAESMPADHFVVKLDFCNAFNCLSRSRMLSEIHHRIPELYSFCHLAYSSPSWLKFGDWCIESQEGVQQGDPLGPMLFCLTIHPLLTSLSSDLTVGYLDDITLGGCESSIANDVQTIIDRGQEFGLQLNRTKCEVISSVCKSPGNSVLSSFVPMCLSHSSLLGAPLSGEEATTTALSSRLEDLKRTASRLKSLAAHDASTILRFSLSAPKLMHVLRSSPSFSNPRLLDYDEALRQCLCAVINADLSVLQWQQASLPVSMGGLGIRLVSHIAPSAFLASAMGTRQLQDAILHKCSLSADSSIDVALSVWSKSLTSSAPPSTSVSSQKSWDRPIVDRIYNSLLESQSNAVDRARLLAVSTKRSSDWLHALPVASCGLFLDNEAIRVAVSFRLGAKTCEPHMCPCGHEVDALGLHGLSCKRSSGRMSRHHNLNDIIWRALSRAGIPSSKEPSGLSRSDGKRPDGMTLVPWCNGKCAVWDVTVIDTMANSYLNTTSVTAGGAAVHAASRKLDKYRDLSLRYEVVPVAIETMGPMNPEGVDFINGIGRLIAEQTGDKRETSFLWQRLSMTLQRFNAVCFNNSFKPIDDLE

SEQ ID NO: 33208 - protein, 991 aa, Enchytraeus crypticus
MPARQTWPLSQTANKKTGICSVCLAQRQLHSGDGKVHLHGPLDNRCPGSNQPPLQISAQAAASQPGLAVSDIRNRIRNRSCDSGSARQSSPPTAAPNSANLSRNSFSSQPLILEHPCLSRPTIKHIPKSARPACSAALIDAFRKIESDPSVLSYWSDLLLFASSVLQVPARTGKRHNLSSLIKKRLEGLGTSAPTEPVVERIKRAHRSHDSRASAVRSKMEDGNVSAAVRILCSDESPAQCTINTFNILKAKHPPAASSSIMAPLPDSMATPPIQVSEQDVVKAVRSFPAGSAGGPDGLRPQHLLELVTCRESAGTFLTALTSFVNLLLRGACPPEVQPVLFGGKLFALNKKSGGIRPIAVGYTWRRLAAKCANRYAVSALSEYLSPIQLGAGIPGGCEAAVHATRRFAESMPADHFVVKLDFCNAFNCLSRSRMLSEIHHRIPELYSFCHLAYSSPSWLKFGDWCIESQEGVQQGDPLGPMLFCLTIHPLLTSLSSDLTVGYLDDITLGGCESSIANDVQTIIDRGQEFGLQLNRTKCEVISSVCKSPGNSVLSSFVPMCLSHSSLLGAPLSGEEATTTALSSRLEDLKRTASRLKSLAAHDALTILRFSLSAPKLMHVLRSSPSFSNPRLLDYDEALRQCLCAVINADLSILQWQQASLPVSMGGLGIRLVSHIAPSAFLASAMGTRQLQDAILHKCSLSADSSIDVALSVWSKSLTSSAPPSTSVSSQKSWDRPIVDRIYNSLLESQSNAVDRARLLAVSTKRSSDWLHALPVASCGLFLDNEAIRVAVSFRLGAKTCEPHMCPCGHEVDALGLHGLSCKRSSGRMSRHHNLNDIIWRALSRAGIPSSKEPSGLSRSDGKRPDGMTLVPWCNGKCAVWDVTVIDTMANSYLNTTSVTAGGAAVHAASRKLDKYRDLSLRYEVVPVAIETMGPMNPEGVDFINGIGRLIAEQTGDKRETSFLWQRLSMTLQRFNAVCFNNSFKPIDDLE

SEQ ID NO: 33209 - protein, 991 aa, Enchytraeus crypticus
MPARQTWPLSQTANKKTGICSVCLAQRQLHSGDGKVHLHGPLDNRCPGSNQPPLQISAQAAASQPGLAVSDIRNRIRNRSCDSGSARQSSPPTAAPNSANFSRNSFSSQPLILEHPCLSRPTIKHIPKSARPACSASLIDAFRKIESDPSVISYWSDLLLFASSVLQVPARTGKRHNLSSLIKKRLEGLGTSAPTEPVVERIKRAHHSHDSRASAVRSKMEDGNVSAAVRILCSDESPAQCNLNTFNILKAKHPPAASSSIMAPLPDSMETPPIQVSEQDVVKAVRSFPAGSAGGPDGLRPQHLLELVTCRESAGTFLTALTSFVNLLLRGVCPPEVQPVLFGGKLFALNKKSGGIRPIAVGYTWRRLAAKCANRYAVSALSEYLSPIQLGAGIPGGCEAAVHATRRFAESMPADHFVVKLDFCNAFNCLSRSRMLSEIHHRIPELYSFCHLAYSSPSWLKFGDWCIESQEGVQQGDPLGPMLFCLTIHPLLTSLSSDLTVGYLDDITLGGCESSIANDVQTIIDRGQEFGLQLNRTKCEVISSVCKSPGNSVLSSFVPMCLSHSSLLGAPLSGEEATTTALSSRLEDLKRTASRLKSLAAHDALTILRFSLSAPKLMHVLRSSPSFSNPRLLDYDEALRQCLCAVINADLSALQWQQASLPVSMGGLGIRLVSHIAPSAFLASAMGTRQLQDAILHKCSLSPDSSIDVALSVWSKSLTSSAPPSTSVSSQKSWDRPIVDRIYNSLLESQSNAVDRARLLAVSTKRSSDWLHALPVASCGLFLDNEAIRVAVSFRLGAKTCEPHMCPCGHEVDALGLHGLSCKRSSGRMSRHHNLNDIIWRALSRAGIPSSKEPSGLSRSDGKRPDGMTLVPWCNGKCAVWDVTVIDTMANSYLNTTSVTAGGAAVHAASRKLDKYRDLSLGYEVVPVAIETMGPMNPEGVDFINGIGRLIAEQTGDKRETSFLWQRLSMTLQRFNAVCFNNSFKPIDDLE

SEQ ID NO: 33210 - protein, 991 aa, Enchytraeus crypticus
MPARQTWPLSQTANKKTGICSVCLAQRQLHSGDGKVHLHGPLDNRCPGSNQPPLQISAQAAASQPGLAVSDIRNRIRNRSCDSGSARQSSPPTAAPNSANLSPNSFSSQPLILEHPCLSRPTIKHIPKSARPACSAALIDAFRKIESDPSVLSYWSDLLLFASSVLQVPARTGKRHNLSSLIKKRLEGLGTSAPTEPVVERIKRAHHSHDSRASAVRSKMEDGNVSAAVRILCSDESPAQCTINTFNILKAKHPPTASSSIMAPLPDSMATPPIQVSEQDVVKAVRSFPAGSAGGPDGLRPQHLLELVTCRESAGTFLTALTSFVNLLLRGACPPEVQPVLFGGKLFALNKKSGGIRPIAVGYTWRRLAAKCANRYAVSALSEYLSPIQLGAGIPGGCEAAVHATRRFAESMPADHFVVKLDFCNAFNCLSRSRMLSEIHHRIPELYSFCHLAYSSPSWLKFGDWCIESQEGVQQGDPLGPMLFCLTIHPLLTSLSSDLTVGYLDDITLGGCESSIANDVQTIIDRGQEFGLQLNRTKCEVISSVCKSPGNSVLSSFVPMCLSHSSLLGAPLSGEEATTTALSSRLEDLKRTASRLKSLAAHDALTILRFSLSAPKLMHVLRSSPSFSNPRLLDYDEALRQCLCAVINADLSVLQWQQASLPVSMGGLGIRLVSHIAPSAFLASAMGTRQLQDAILHKCSLSADSSIDVALSVWSKSLTSSAPPSTSVSSQKSWDRPIVDRIYNSLLESQSNAVDRARLLAVSTKRSSDWLHALPVASCGLFLDNEAIRVAVSFRLGAKTCEPHMCPCGHEVDALGLHGLSCKRSSGRMSRHHNLNDIIWRALSRAGIPSSKEPSGLSRSDGKRPDGMTLVPWCNGKCAVWDVTVIDTMANSYLNTTSVTAGGAAVHAASRKLDKYRDLSLGYEVVPVAIETMGPMNPEGVDFINGIGRLIAEQTGDKRETSFLWQRLSMTLQRFNAVCFNNSFKPIDDLE

SEQ ID NO: 33211 - protein, 772 aa, Enchytraeus crypticus
MEDGNVSAAVRILCSDESPAQCTINTFNILKAKHPPTASSSIMAPLPDSMATPPIQVSEQDVVKAVRSFPAGSAGGPDGLRPQHLLELVTCRESAGTFLTALTSFVNLLLRGACPPEVQPVLFGGKLFALNKKSGGIRPIAVGYTWRRLAAKCANRYAVSALSEYLSPIQLGAGIPGGCEAAVHATRRFAESMPADHFVVKLDFCNAFNCLSRSRMLSEIHHRIPELYSFCHLAYSSPSWLKFGDWCIESQEGVQQGDPLGPMLFCLTIHPLLTSLSSDLTVGYLDDITLGGCESSIANDVQTIIDRGQEFGLQLNRTKCEVISSVCKSPVNSVLSSFVPMCLSHSSLLGAPLSGEEATTPALSSRLEDLKRTASRLKSLAAHDALTILRFSLSAPKLMHVLRSSPSFPNPRLLDYDEALRQCLCAVINADLSVLQWHQASLPVSMGGLGIRLVSHIAPSAFLASAMGTRQLQDAILHKCSLSADSSIDVALSVGSKSLTSSAPPSTSVSSQKSWDRPIVDRIYNRLLESQSNAVDRARLLAVSTKRSSDWLHALPVASCGLFLDNEAIRVAVSFRLGAKTCEPHMCPCGHEVDALGLHGLSCKRSSGRMSRHHNLNDIIWRALSRAGIPSSKEPSGLSRSDGKRPDGMTLVPWYNGKCAVWDVTVIDTMANSYLNTTSVTAGGAAVHAASRKFDKYRDLSLGYEVVPVAIETMGPMNPEGVDFINGIGRLIAEQTVDKRETSFLWQRLSMTLQRFNAVCFSNSFKPIDDLE

SEQ ID NO: 33212 - protein, 991 aa, Enchytraeus crypticus
MPARQTWPLSQTANKKTGICSVCLAQRQLHSGDGKVHLHGPLDNRCPGSNQPPLQISAQAAASQPGLAVSDIRNRIRNRSCDSGSARQSSPPTAAPNSANLSRNSFSSQPLILEHPCLSRPTIKHIPKSARPACSAALIDAFRKIESDPSVLSYWSDLLLFASSVLQVPARTGKRHNLSSLIKKRLEGLGTSAPTEPVVERIKRAHHSHDSRASAVRSKMEDGNVSAAVRILCSDESPAQCTINTFNILKAKHPPAASSSIMAPLPDSMATPPIQVSEQDVVKAVRSFPAGSAGGPDGLRPQHLLELVTCRESAGTFLTALTSFVNLLLRGACPPEVQPVLFGGKLFALNKKSGGIRPIAVGYTWRRLAAKCANRYAVSALSEYLSPIQLGAGIPGGCEAAVHATRRFAESMPADHFVVKLDFCNAFNCLSRSRMLSEIHHRIPELYSFCHLAYSSPSWLKFGDWCIESQEGVQQGDPLGPMLFCLTIHPLLTSLSSDLTVGYLDDITLGGCESSIANDVQTIIDRGQEFGLQLNRTKCEVISSVCKSPGNSVLSSFVPMCLSHSSLLGAPLSGEEATTTALSSRLEDLKRTASRLKSLAAHDALTILRFSLSAPKLMHVLRSSPSFSNPRLLDYDEALRQCLCAVINADLSVLQWQQASLPVSMGGLGIRLVSHIAPSAFLASAMGTRQLQDAILHKCSLSADSSIDVALSVWSKSLTSSAPPSTSVSSQKSWDRPIVDRIYNSLLESQSNAVDRARLLAVSTKRSSDWLHALPVASCGLFLDNEAIRVAVSFRLGAKTCEPHMCPCGHEVDALGLHGLSCKRSSGRMSRHHNLNDIIWRALSRAGIPSSKEPSGLSRSDGKRPDGMTLVPWCNGKCAVWDVTVIDTMANSYLNTTSVTAGGAAVHAASRKLDKYRDLSLGYEVVPVAIETMGPMNPEGVEFINGIGRLIAEQTGDKRETSFLWQRLSMTWQRFNAVCFNNSFKPIDDLE

SEQ ID NO: 33213 - protein, 991 aa, Enchytraeus crypticus
MPARQTWPLSQTANKKTGICSVCLAQRQLHSGDGKVHLHGPLDNRCPGSNQPPLQISAQAAASQPGLAVSDIRNRIRNRSCDSGSARQSSPPTAAPNSANLSPNSFSSQPLILEHPCLSRPTIKHIPKSARPACSAALIDAFRKIESDPSVLSYWSDLLLFASSVLQVPARTGKRHNLSSLIKKRLEGLGTSAPTEPVVERIKRAHHSHDSRASAVRSKMEDGNVSAAVRILCSDESPAQCTINTFNILKAKHPPAASSSIMAPLPDSMATPPIQVSEQDVVKAVRSFPAGSAGGPDGLRPQHLLELVTCRESAGTFLTALTSFVNLLLRGACPPEVQPVLFGGKLFALNKKSGGIRPIAVGYTWRRLAAKCANRYAVSALSEYLSPIQLGAGIPGGCEAAVHATRRFAESMPADHFVVKLDFCNAFNCLSRSRMLSEIHHRIPELYSFCHLAYSSPSWLKFGDWCIESQEGVQQGDPLGPMLFCLTIHPLLTSLSSDLTVGYLDDITLGGCESSIANDVQTIIDRGQEFGLQLNRTKCEVISSVCKSPGNSVLSSFVPMCLSHSSLLGAPLSGEEATTTALSSRLEDLKRTASRLKSLAAHDALTILRFSLSAPKLMHVLRSSPSFSNPRLLDYDEALRQCLCAVINADLSDLQWQQASLPVSMGGLGIRLVSHIAPSAFLASAMGTRQLQDAILHKCSLSADSSIDVALSVWSKSLTSSAPPSTSVSSQKSWDRPIVDRIYNSLLESQSNAVDRARLLAVSTKRSSDWLHALPVASCGLFLDNEAIRVAVSFRLGAKTCEPHMCPCGHEVDALGLHGLSCKRSSGRMSRHHNLNDIIWRALSRAGIPSSKEPSGLSRSDGKRPDGMTLVPWCNGKCAVWDVTVIDTMANSYLNTTSVTAGGAAVHAASRKLDKYRDLSLGYEVVPVAIETMGPMNPEGVDFINGIGRLIAEQTGDKRETSFLWQRLSMTLQRFNAVCFNNSFKPIDDLE

SEQ ID NO: 33214 - protein, 991 aa, Enchytraeus crypticus
MPARQTWPLSQTANKKTGICSVCLAQRQLHSGDGKVHLHGPLDNRCPGSNQPPLQISAQAAASQPGLAVSDIRNRIRNRSCDSGSARQSSPPTAAPNSANLSPNSFSSQPLILEHPCLSRPTIKHIPKSARPACSAALIDAFRKIESDPSVLSYWSDLLLFASSVLQVPARTGKRHNLSSLIKKRLEGLGTSAPTEPVVERIKRAHHSHDSRASAVRSKMEDGNVSAAVRILCSDESPAQCTINTFNILKAKHPPTASSSIMAPLPDSTATPPIQVSEQDVVKAVRSFPAGSAGGPDGLRPQHLLELVTCRESAGTFLTALTSFVNLLLRGACPPEVQPVLFGGKLFALNKKSGGIRPIAVGYTWRRLAAKCANRYAVSALSEYLSPIQLGAGIPGGCEAAVHATRRFAESMPADHFVVKLDFCNAFNCLSRSRMLSEIHHRIPELYSFCHLAYSSPSWLKFGDWCIESQEGVQQGDPLGPMLFCLTIHPLLTSLSSDLTVGYLDDITLGGCESSIANDVQTIIDRGQEFGLQLNRTKCEVISSVCKSPGNSVLSSFVPMCLSHSSLLGAPLSGEEATTTALSSRLEDLKRTASRLKSLAAHDALTILRFSLSAPKLMHVLRSSPSFSNPRLLDYDEALRQCLCAVINADLSVLQWQQASLPVSMGGLGIRLVSHIAPSAFLASAMGTRQLQDAILHKCSLSADSSIDVALSVWSKSLTSSAPPSTSVSSQKSWDRPIVDRIYNSLLESQSNAVDRARLLAVSTKRSSDWLHALPVASCGLFLDNEAIRVAVSFRLGAKTCEPHMCPCGHEVDALGLHGLSCKRSSGRMSRHHNLNDIIWRALSRAGIPSSKEPSGLSRSDGKRPDGMTLVPWCNGKCAVWDVTVIDTMANSYLNTTSVTAGGAAVHAASRKLDKYRDLSLGYEVVPVAIETMGPMNPEGVDFINGIGRLIAEQTGDKRETSFLWQRLSMTLQRFNAVCFNNSFKPIDDLE

SEQ ID NO: 33215 - protein, 930 aa, Enchytraeus crypticus
MPARQTWPLSQTANKKTGICSVCLAQRQLHSGDGKVHLHGPLDNRCPGSNQPPLQISAQAAASQPGLAVSDIRNRIRNRSCDSGSARQSSPPTAAPNSANLSPNSFSSQPLILEHPCLSRPTIKHIPKSARPACSAALIDAFRKIESDPSVLSYWSDLLLFASSVLQVPARTGKRHNLSSLIKKRLEGLGTSAPTEPVVERIKRAHHSHDSRASAVRSKMEDGNVSAAVRILCSDESPAQCTINTFNILKAKHPPTASSSIMAPLPDSMATPPIQVSEQDVVKAVRSFPAGSAGGPDGLRPQHLLELVTCRESAGTFLTALTSFVNLLLRGACPPEVQPVLFGGKLFALNKKSGGIRPIAVGYTWRRLAAKCANRYAVSALSEYLSPIQLGAGIPGGCEAAVHATRRFAESMPADHFVVKLDFCNAFNCLSRSRMLSEIHHRIPELYSFCHLAYSSPSWLKFGDWCIESQEGVQQGDPLGPMLFCLTIHPLLTSLSSDLTVGYLDDITLGGCESSIANDVQTIIDRGQEFGLQLNRTKCEVISSVCKSPGNSVLSSFVPMCLSHSSLLGAPLSGEEATTTALSSRLEDLKRTASRLKSLAAHDALTILRFSLSAPKLMHVLRSSPSFSNPRLLDYDEALRQCLCAVINADLSDLQWQQASLPVSMGGLGIRLVSHIAPSAFLASAMGTRQLQDAILHKCSLSADSSIDVALSVWSKSLTSSAPPSTSVSSQKSWDRPIVDRIYNSLLESQSNAVDRARLLAVSTKRSSDWLHALPVASCGLFLDNEAIRVAVSFRLGAKTCEPHMCPCGHEVDALGLHGLSCKRSSGRMSRHHNLNDIIWRALSRAGIPSSKEPSGLSRSDGKRPDGMTLVPWCNGKCAVWDVTVIDTMANSYLNTTSVTAGGAAVHAASRKLDKYRDLSLGYEVVPVGH

SEQ ID NO: 33216 - protein, 920 aa, Enchytraeus crypticus
MPARQTWPLSQTANKKTGICSVCLAQRQLHSGDGKVHLHGPLDNRCPGSNQPPLQISAQAAASQPGLAVSDIRNRIRNRSCDSGSARQSSPPTAAPNSANLSPNSFSSQPLILEHPCLSRPTIKHIPKSARPACSAALIDAFRKIESDPSVLSYWSDLLLFASSVLQVPARTGKRHNLSSLIKKRLEGLGTSAPTEPVVERIKRAHHSHDSRASAVRSKMEDGNVSAAVRILCSDESPAQCTINTFNILKAKHPPTASSSIMAPLPDSTATPPIQVSEQDVVKAVRSFPAGSAGGPDGLRPQHLLELVTCRESAGTFLTALTSFVNLLLRGACPPEVQPVLFGGKLFALNKKSGGIRPIAVGYTWRRLAAKCANRYAVSALSEYLSPIQLGAGIPGGCEAAVHATRRFAESMPADHFVVKLDFCNAFNCLSRSRMLSEIHHRIPELYSFCHLAYSSPSWLKFGDWCIESQEGVQQGGPLGPMLFCLTIHPLLTSLSSDLTVGYLDDITLGGCESSIANDVQTIIDRGQEFGLQLNRTKCEVISSVCKSPGNSVLSSFVPMCLSHSSLLGAPLSGEEATTTALSSRLEDLKRTASRLKSLAAHDALTILRFSLSAPKLMHVLRSSPSFSNPRLLDYDEALRQCLCAVINADLSVLQWQQASLPVSMGGLGIRLVSHIAPSAFLASAMGTRQLQDAILHKCSLSADSSIDVALSVWSKSLTSSAPPSTSVSSQKSWDRPIVDRIYNSLLESQSNAVDRARLLAVSTKRSSDWLHALPVASCGLFLDNEAIRVAVSFRLGAKTCEPHMCPCGHEVDALGLHGLSCKRSSGRMSRHHNLNDIIWRALSRAGIPSSKEPSGLSRSDGKRPDGMTLVPWCNGKCAVWDVTVIDTMANSYLNTTSVTAVVLLFMPPLGSWINTVICP

SEQ ID NO: 33217 - protein, 991 aa, Enchytraeus crypticus
MPARQTWPLSQTANKKTGICSVCLAQRQLHSGDGKVHLHGPLDNRCPGSNQPPLQISAQAAASQPGLAVSDIRNRIRNRSCDSGSARQSSPPTAAPNSANLSRNSFSSQPLILEHPCLSRPTIKHIPKSARPACSAALIDAFRKIESDPSVLSYWSDLLLFASSVLQVPARTGKRHNLSSLIKKRLEGLGTSAPTEPVVERIKRAHHSHDSRASAVRSKMEDGNVSAAVRILCSDESPAQCTKNTFNILKAKHPPAASSSIMAPLPDSMATPPIQVSEQDVVKAVRSFPAGSAGGPDGLRPQHLLELVTCRESAGTFLTALTSFVNLLLRGACPPEVQPVLFGGKLFALNKKSGGIRPIAVGYTWRRLAAKCANRYAVSALSEYLSPIQLGAGIPGGCEAAVHATRRFAESMPADHFVVKLDFCNAFNCLSRSRMLSEIHHRIPELYSFCHLAYSSPSWLKFGDWCIESQEGVQQGDPLGPMLFCLTIHPLLTSLSSALTVGYLDDITLGGCESSIANDVQTIIDRGQEFGLQLNRTKCEVISSVCKSPGNSVLSSFVPMCLSHSSLLGAPLSGEEATTTALSSRLEDLKRTASRLKSLAAHDALTILRFSLSAPKLMHVLRSSPSFSNPRLLDYDEALRQCLCAVINADLSVLQWQQASLPVSMGGLGIRLVSHIAPSAFLASAMGTRQLQDAILHKCSLSADSSIDVALSVWSKSLTSSAPPSTSVSSQKSWDRPIVDRIYNSLLESQSNAVDRARLLAVSTKRSSDWLHALPVASCGLFLDNKAIRVAVSFRLGAKTCEPHMCPCGHEVDALGLHGLSCKRSSGRMSRHHNLNDIIWRALSRAGIPSYKEPSGLSRSDGKRPDGMTLVPWCNGKCAVWDVTVIDTIANSYLNTTSVTAGGAAVHAASRKLDKYRDLSLGYEVVPVAIETRGPMNPEGVDFINGIGRLIAEQTGDKRETSFLWQRLSMTLQRFNAVCFNNSFKPIDDLE

SEQ ID NO: 33218 - protein, 772 aa, Enchytraeus crypticus
MEDGNVSAAVRILCSDESPAQCTINTFNILKAKHPPAASSSIMAPLPDSMATPPIQVSEQDVVKAVRSFPAGSAGGPDGLRPQHLLELVTCRESAGTFLTALTSFVNLLLRGACPPEVQPVLFGGKLFALNKKSGGIRPIAVGYTWRRLAAKCANRYAVSALSEYLSPIQLGAGIPGGCEAAVHATRRFAESMPADHFVVKLDFCNAFNCLSRSRMLSEIHHRIPELYSFCHLAYSSPSWLKFGDWCIESQEGVQQGDPLGPMLFCLTIHPLLTSLSSDLTVGYLDDITLGGCESSIANDVQTIIDRGQEFGLQLNRTKCEVISSVCKSPGNSVLSSFVPMCLSHSSLLGAPLSGEEATTTALSSRLEDLKRTASRLKSLAAHDALTILRFSLSAPKLMHVLRSSPSFSNPRLLDYDEALRQCLCAVINADLSVLQWQQASLPVSMGGLGIRLVSHIAPSAFLASAMGTRQLQDAILHKCSLSADSSIDVALSVWSKSLTSSAPPSTSVSSQKSWDRPIVDRIYNSLLESQSNAVDRARLLAVSTKRSSDWLHALPVASCGLFLDNEAIRVAVSFRLGAKTCEPHMCPCGHEVDALGLHGLSCKRSSGRMSRHHNLNDIIWRALSRAGIPSSKEPSGLSRSDGKRPDGMTLVPWCNGKCAVWDVTVIDTMANSYLNTTSVTAGGAAVHAAFRKLDKYRDLSLGYEVVPVAIETMGPMNPEGVDFINGIGRLIAEQTGDKRETSFLWQRLSMTLQRFNAVCFNNSFKPIDDLE

SEQ ID NO: 33219 - protein, 991 aa, Enchytraeus crypticus
MPARQTWPLSQTANKKTGICSVCLAQRQLHSGDGKVHLHGPLDNRCPGSNQPPLQISAQAAASQPGLAVSDIRNRIRNRSCDSGSARQSSPPTAAPNSANLSRNSFSSQPLILEHPCLSRPTIKHIPKSARPACSAALIDAFRKIESDPSVLSYWSDLLLFASSVLQVPARTGKRHNLSSLIKKRLEGLGTSAPTEPVVERIKRAHHSHDSRASAVRSKMEDGNVSAAVRILCSDESPAQCNLNTFNILKAKHPPAASSSIMAPLPDSMETPPIQVSEQDVVKAVRSFPAGSAGGPDGLRPQHLLELVTCRESAGTFLTALTSFVNLLLRGVCPPEVQPVLFGGKLFALNKKSGGIRPIAVGYTWRRLAAKCANRYAVSALSEYLSPIQLGAGIPGGCEAAVHATRRFAESMPADHFVVKLDFCNAFNCLSRSRMLSEIHHRIPELYSFCHLAYSSPSWLKFGDWCIESQEGVQQGDPLGPMLFCLTIHPLLTSLSSDLTVGYLDDITLGGCESSIANDVRTIIDRGQEFGLQLNRTKCEVISSVCKSPGNSVLSSFVPMCLSHSSLLGAPLSGEEATTTALSSRLEDLKRTASRLKSLAAHDALTILRFSLSAPKLMHVLRSSPSFSNPRLLDYDEALRQCLCAVINADLSVLQWQQASLPVSMGGLGIRLVSHIAPSAFLASAMGTRQLQDAILHKCSLSADSSIDVALSVWSKSLTSSAPPSTSVSSQKSWDRPIVDRIYNSLLESQSNAVDRARLLAVSTKRSSDWLHALPVASCGLFLDNEAIRVAVSFRLGAKTCEPHMCPCGHEVDALGLHGLSCKRSSGRMSRHHNLNDIIWRALSRAGIPSYKEPSGLSRSDGKRPDGMTLVPWCNGKCAVWDVTVIDTMANSYLNTTSVTAGGAAVHAASRKLDKYRDLSLGYEVVPVAIETMGPMNPEGVDFINGIGRLIAEQTGDKRETSFLWQRLSMTLQRFNAVCFNNSFKPIDDLE

SEQ ID NO: 33220 - protein, 991 aa, Enchytraeus crypticus
MPARQTWPLSQTANKKTGICSVCLAQRQLHSGDGKVHLHGPLDNRCPGSNQPPLQISAQAAASQPGLAVSDIRNKIRNRSCDSGSARQSSPPTAAPNSANLSRNSFSSQPLILEHPCLSRPTIKHIPKSARPACSAALIDAFRKIESDPSVLLYWSDLLLFASSVLQVPARTGKRHNLSSLIKKRLEGLGTSAPTEPVVERIKRAHHSHDSRASAVRSKMEDGNVSAAVRILCSDESPAQCNLNTFNILKAKHPPAASSSIMAPLPDSMETPPIQVSEQDVVKAVRSFPAGSAGGPDGLRPQHLLELVTCRESAGTFLTALTSFVNLLLRGVCPPEVQPVLFGGKLFALNKKSGGIRPIAVGYTWRRLAAKCANRYAVSALSEYLSPIQLGAGIPGGCEAAVHATRRFAESMPADHFVVKLDFCNAFNCLSRSRMLSEIHHRIPELYSFCHLAYSSPSWLKFGDWCIESQEGVQQGDPLGPMLFCLTIHPLLTSLSSDLTVGYLDDITLGGCESSIANDVRTIIDRGQEFGLQLNRTKCEVISSVCKSPGNSVLSSFVPMCLSHSSLLGAPLSGEEATTTALSSRLEDLKRTASRLKSLAAHDALTILRFSLSAPKLMHVLRSSPSFSNPRLLDYDEALRQCLCAVINADLSDLQWQQASLPVSMGGLGIRLVSHIAPSAFLASAMGTRQLQDAILHKCSLSADSSIDVALSVWSKSLTSSAPPSTSVSSQKSWDRPIVDRIYNSLLESQSNAVDRARLLAVSTKRSSDWLHALPVASCGLFLDNEAIRVAVSFRLGAKTCEPHMCPCGHEVDALGLHGLSCKRSSGRMSRHHNLNDIIWRALSRAGIPSYKEPSGLSRSDGKRPDGMTLVPWCNGKCAVWDVTVIDTMANSYLNTTSVTAGGAAVHAASRKLDKYRDLSLGYEVVPVAIETMGPMNPEGVDFINGIGRLIAEQTGDKRETSFLWQRLSMTLQRFNAVCFNNSFKPIDDLE

SEQ ID NO: 33221 - protein, 920 aa, Enchytraeus crypticus
MPARQTWPLSQTANKKTGICSVCLAQRQLHSGDGKVHLHGPLDNRCPGSNQPPLQISAQAAASQPGLAVSDIRNKIRNRSCDSGSARQSSPPTAAPNSANLSRNSFSSQPLILEHPCLSRPTIKHIPKSARPACSAALIDAFRKIESDPSVLLYWSDLLLFASSVLQVPARTGKRHNLSSLIKKRLEGLGTSAPTEPVVERIKRAHHSHDSRASAVRSKMEDGNVSAAVRILCSDESPAQCNLNTFNILKAKHPPAASSSIMAPLPDSMETPPIQVSEQDVVKAVRSFPAGSAGGPDGLRPQHLLELVTCRESAGTFLTALTSFVNLLLRGVCPPEVQPVLFGGKLFALNKKSGGIRPIAVGYTWRRLAAKCANRYAVSALSEYLSPIQLGAGIPGGCEAAVHATRRFAESMPADHFVVKLDFCNAFNCLSRSRMLSEIHHRIPELYSFCHLAYSSPSWLKFGDWCIESQEGVQQGDPLGPMLFCLTIHPLLTSLSSDLTVGYLDDITLGGCESSIANDVRTIIDRGQEFGLQLNRTKCEVISSVCKSPGNSVLSSFVPMCLSHSSLLGAPLSGEEATTTALSSRLEDLKRTASRLKSLAAHDALTILRFSLSAPKLMHVLRSSPSFSNPRLLDYDEALRQCLCAVINADLSDLQWQQASLPVSMGGLGIRLVSHIAPSAFLASAMGTRQLQDAILHKCSLSADSSIDVALSVWSKSLTSSAPPSTSVSSQKSWDRPIVDRIYNSLLESQSNAVDRARLLAVSTKRSSDWLHALPVASCGLFLDNEAIRVAVSFRLGAKTCEPHMCPCGHEVDALGLHGLSCKRSSGRMSRHHNLNDIIWRALSRAGIPSSKEPSGLSRSDGKRPDGMTLVPWCNGKCAVWDVTVIDTMANSYLNTTSVTAGVLLFMPPLGSWINTVICP

SEQ ID NO: 33222 - protein, 991 aa, Enchytraeus crypticus
MPARQTWPLSQTANKKTGICSVCLAQRQLHSGDGKVHLHGPLDNRCPGSNQPPLQISAQAAASQPGLAVSDIRNRIRNRSCDSGSARQSSPPTAAPNSANLSPNSFSSQPLILEHPCLSRPTIKHIPKSARPACSAALIDAFRKIESDPSVLSYWSDLLLFASSVLQVPARTGKRHNLSSLIKKRLEGLGTSAPTEPVVERIKRAHHSHDSRASAVRSKMEDGNVSAAVRILCSDESPAQCTINTFNILKAKHPPTASSSIMAPLPDSMATPPIQVSEQDVVKAVRSFPAGSAGGPDGLRPQHLLELVTCRESAGTFLTALTSFVNLLLRGVCPPEVQPVLFGGKLFALNKKSGGIRPIAVGYTWRRLAAKCANRYAVSALSEYLSPIQLGAGIPGGCEAAVHATRRFAESMPADHFVVKLDFCNAFNCLSRSRMLSEIHHRIPELYSFCHLAYSSPSWLKFGDWCIESQEGVQQGDPLGPMLFCLTIHPLLTSLSSDLTVGYLDDITLGGCESSIANDVQTIIDRGQEFGLQLNRTKCEVISSVCKSPGNSVLSSFVSMCLSHSSLLGAPLSGEEATTTALSSRLEDLKRTASRLKSLAAHDALTILRFSLSAPKLMHVLRSSPSFSNPRLLDYDEALRQCLCAVINADLSVLQWQQASLPVSMGGLGIRLVSHIAPSAFLASAMGTRQLQDAILHKCSLSADSSIDVALSVWSKSLTSSAPPSTSVSSQKSWDRPIVDRIYNSLLESQSNAVDRARLLAVSTKRSSDWLHALPVASCGLFLDNEAIRVAVSFRLGAKTCEPHMCPCGHEVDALGLHGLSCKRSSGRMSRHHNLNDIIWRALSRAGIPSSKEPSGLSRSDGKRPDGMTLVPWCNGKCAVWDVTVIDTMANSYLNTTSVTAGGAAVHAASRKLDKYRDLSLGYEVVPVAIETMGPMNPEGVDFINGIGRLIAEQTGDKRETSFLWQRLSMTLQRFNAVCFNNSFKPIDDLE

SEQ ID NO: 33223 - protein, 991 aa, Enchytraeus crypticus
MPARQTWPLSQTANKKTGICSVCLAQRQLHSGDGKVHLHGPLDNRCPGSNQPPLQISAQAAASQPGLAVSDIRNKIRNRSCDSGSARQSSPPTAAPNSANLSRNSFSSQPLILEHPCLSRPTIKHIPKSARPACSAALIDAFRKIESDPSVLLYWSDLLLFASSVLQVPARTGKRHNLSSLIKKRLEGLGTSAPTEPVVERIKRAHHSHDSRASAVRSKMEDGNVSAAVRILCSDESPAQCNLNTFNILKAKHPPAASSSIMAPLPDSMETPPIQVSEQDVVKAVRSFPAGSAGGPDGLRPQHLLELVTCRESAGTFLTALTSFVNLLLRGVCPPEVQPVLFGGKLFALNKKSGGIRPIAVGYTWRRLAAKCANRYAVSALSEYLSPIQLGAGIPGGCEAAVHATRRFAESMPADHFVVKLDFCNAFNCLSRSRMLSEIHHRIPELYSFCHLAYSSPSWLKFGDWCIESQEGVQQGDPLGPMLFCLTIHPLLTSLSSDLTVGYLDDITLGGCESSIANDVRTIIDRGQEFGLQLNRTKCEVISSVCKSPGNSVLSSFVPMCLSHSSLLGAPLSGEEATTTALSSRLEDLKRTASRLKSLAAHDALTILRFSLSAPKLMHVLRSSPSFSNPRLLDYDEALRQCLCAVINADLSDLQWQQASLPVSMGGLGIRLVSHIAPSAFLASAMGTRQLQDAILHKCSLSADSSIDVALSVWSKSLTSSAPPSTSVSSQKSWDRPIVDRIYNSLLESQSNAVDRARLLAVSTKRSSDWLHALPVASCGLFLDNEAIRVAVSFRLGAKTCEPHMCPCGLEVDALGLHGLSCKRSSGRMSRHHNLNDIIWRALSRAGIPSYKEPSGLSRSDGKRPDGMTLVPWCNGKCAVWDVTVIDTMANSYLNTTSVTAGGAAVHAASRKLDKYRDLSLGYEVVPVAIETMGPMNPEGVDFINGIGRLIAEQTGDKRETSFLWQRLSMTLQRFNAVCFNNSFKPIDDLE

SEQ ID NO: 33224 - protein, 922 aa, Enchytraeus crypticus
MPARQTWPLSQTANKKTGICSVCLAQRQLHSGDGKVHLHGPLDNRCPGSNQPPLQISAQAAASQPGLAVSDIRNRIRNLSCDSGSARQSSPPTAAPNSANLSRNSFSSQPLILEHPCLSRPTIKHIPKSARPACSAALIDAFRKIESDPSVLSYWSDLLLFASSVLQVPARTGKRHNLSSLIKKRLEGLGTSAPTEPVVERIKRAHHSHDSRASAVRSKMEDGNVSAAVRILCSDESPAQCTINTFNILKAKHPPAASSSIMAPLPDSMATPPIQVSEQDVVKAVRSFPAGSAGGPDGLRPQHLLELVTCRESAGTFLTALTSFVNLLLRGVCPPEVQPVLFGGKLFALNKKSGGIRPIAVGYTWRRLAAKCANRYAVSALSEYLSPIQLGAGIPGGCEAAVHATRRFAESMPADHFVVKLDFCNAFNCLSRSRMLSEIHHRIPELYSFCHLAYSSPSWLKFGDWCIESQEGVQQGDPLGPMLFCLTIHPLLTSLSSDLTVGYLDDITLGGCESSIANDVQTIIDRGQEFGLQLNRTKCEVISSVCKSPGNSVLSSFVPMCLSHSSLLGAPLSGEEATTTALSSRLEDLKRTASRLKSLAAHDALTILRFSLSAPKLMHVLRSSPSFSNPRLLDYDEALRQCLCAVINADLSVLQWQQASLPVSMGGLGIRLVSHIAPSAFLASAMGTRQLQDAILHKCSLSADSSIDVALSVWSKSLTSSAPPSTSVSSQKSWDRPIVDRIYNSLLESQSNAVDRARLLAVSTKRSSDWLHALPVASCGLFLDNEAIRVAVSFRLGAKTCEPHMCPCGHEVDALGLHGLSCKRSSGRMSRHQNLNDIIWRALSRAGIPSSKEPSGLSRSDGKRPDGMTLVPWCNGKCAVWDVTVIDTMANSYLNTTSVTAGGAAVHAASRKLDKYRDLSLI

SEQ ID NO: 33225 - protein, 991 aa, Enchytraeus crypticus
MPARQTWPLSQTANKKTGICSVCLAQRQLHSGDGKVHLHGPLDNRCPGSNQPPLQISAQAAASQPGLAVSDIRNSIRNRSCDSGSASQSSPPTAAPNSANLSRNSFSSQPLILEHPCLSRPTIKHIPKSARPACSAALIDAFRKIESDPSVLSYWSDLLLFASSVLQVPARTGKRHNLSSLIKKRLEGLGTSAPTEPVVERIKRAHHSHDSRASAVRSKMEDGNVSAAVRILCSDESPAQCTINTFNILKAKHPPAASSSIMAPLPDSMATPPIQVSEQDVVKAVRSFPAGSAGGPDGLRPQHLLELVTCRESAGTFLTALTSFVNLLLRGACPPEVQPVLFGGKLFALNKKSGGIRPIAVGYTWRRLAAKCANRYAVSALSEYLSPIQLGAGIPGGCEAAVHATRRFAESMPADHFVVKLDFCNAFNCLSRSRMLSEIHHRIPELYSFCHLAYSSPSWLKFGDWCIESQEGVQQGDPLGPMLFCLTIHPLLTSLSSDLTVGYLDDITLGGCESSIANDVQTIIDRGQEFGLQLNRTKCEVISSVCKSPGNSVLSSFVPMCLSHSSLLGAPLSGEEATTTALSSRLEDLKRTASRLKSLAAHDALTILRFSLSAPKLMHVLRSSPSFSNPRLLDYDEALRQCLCAVINADLSVLQWQQASLPVSMGGLGIRLVSHIAPSAFLASAMGTRQLQDAILHKCSLSADSSIDVALSVWSKSLTSSAPPSTSVSSQKSWDRPIVDRIYNSLLESQSNAVDRARLLAVSTKRSSDWLHALPVASCGLFLDNEAIRVAVSFRLGAKTCEPHMCPCGHEVDALGLHGLSCKRSSGRMSRHHNLNDIIWRALSRAGIPSSKEPSGLSRSDGKRPDGMTLVPWCNGKCAVWDVTVIDTMANSYLNTTSVTAGGAAVHAASRKLDKYRDLSLGYEVVPVAIETMGPMNPEGVDFINGIGRLIAEQTGDKRETSFLWQRLSMTLQRFNAVCFNNSFKPIDDLE

SEQ ID NO: 33226 - protein, 976 aa, Enchytraeus crypticus
MSRFNDDDDDDNNNNNNNNNNNNNNNNNNRCPGSNQPPLQISAQAAASQPGLAVSDIRNKIRNRSCDSGSARQSSPPTAAPNSANLARNSFSSQPLILEHPCLSRPTIKHIPKSARPACSAALIDAFRKIESDPSVLSYWSDLLLFASSVLQVPARTGKRHNLSSLIKKRLEGLGTSAPTEPVVERIKRAHHSHDSRASAVRSKMEDGNVSAAVRILCSDESPAQCNLNTFNILKAKHPPAASSSIMALLPDSMETPPIQVSEQDVVKAVRSFPAGSAGGPDGLRPQHLLELVTCRESAGTFLTALTSFVNLLLRGVCPPEVQPVLFGGKLFALNKKSGGIRPIAVGYTWRRLAAKCANRYAVSALSEYLSPIQLGAGIPGGCEAAVHATRRFAESMPADHFVVKLDFCNAFNCLSRSRMLSEIHHRIPELYSFCHLAYSSPSWLKFGDWCIESQEGVQQGDPLGPMLFCLTIHPLLTSLSSDLTVGYLDDITLGGCESSIANDVRTIIDRGQEFGLQLNRTKCEVISSVCKSPGNSVLSSFVPMCLSHSSLLGAPLSGEEATTTALSSRLEDLKRTASRLKSLAAHDALTILRFSLSAPKLMHVLRSSPSFSNPRLLDYDEALRQCLCAVINADLSDLQWQQASLPVSMGGLGIRLVSHIAPSAFLASAMGTRQLQDAILHKCSLSADSSIDVALSVWSKSLTSSAPPSTSVSSQKSWDRPIVDRIYNSLLESQSNAVDRARLLAVSTKRSSDWLHALPVASCGLFLDNEAIRVAVSFRLGAKTCEPHMCPCGHEVDALGLHGLSCKRSSGRMSRHHNLNDIIWRALSRAGIPSYKEPSGLSRSDGKRPDGMTLVPWCNGKCAVWDVTVIDTMANSYLNTTSVTAGGAAVHAASRKLDKYRDLSLGYEVVPVAIETMGPMNPEGVDFINGIGRLIAEQTGDKRETSFLWQRLSMTLQRFNAVCFNNSFKPIDDLE

SEQ ID NO: 33227 - protein, 772 aa, Enchytraeus crypticus
MEDGNVSAAVRILCSDESPAQCNLNTFNILKAKHPPAASSSIMAPLPDSMETPPIQVSEQDVVKAVRSFPAGSAGGPDGLRPQHLLELVTCRESAGTFLTALTSFVNLLLRGVCPPEVQPVLFGGKLFALNKKSGGIRPIAVGYTWRRLAAKCANRYAVSALSEYLSPIQLGAGIPGGCEAAVHATRRFAESMPADHFVVKLDFCNAFNCLSRSRMLSEIHHRIPELYSFCHLAYSSPSWLKFGDWCIESQEGVQQGDPLGPMLFCLTIHPLLTSLSSDLTVGYLDDITLGGCESSIANDVRTIIDRGQEFGLQLNRTKCEVISSVCKSPGNSVLSSFVPMCLSHSSLLGAPLSGEEATTTALSSRLEDLKRTASRLKSLAAHDALTILRFSLSAPKLMHVLRSSPSFSNPRLLDYDEALRQCLCAVINADLSDLQWQQASLPVSMGGLGIRLVSHIAPSAFLASAMGTRQLQDAILHKCSLSADSSIDVALSVWSKSLTSSAPPSTSVSSQKSWDRPIVDRIYNSLLESQSNAVDRARLLAVSTKRSSDWLHALPVASCGLFLDNEAIRVAVSFRLGAKTCEPHMCPCGHEVDALGLHGLSCKRSSGRMSRHHNLNDIIWRALSRAGIPSYKEPSGLSRSDGKRPDGMTLVPWCNGKCAVWDVTVIDTMANSYLNTTSVTAGGAAVHAASRKLDKYRDLSLGYEVVPVAIETMGPMNPEGVDFINGIGRLIAEQTGDKRETSFLWQRLSMTLQRFNAVCFNNSFKPIDDLE

SEQ ID NO: 33228 - protein, 946 aa, Enchytraeus crypticus
MPARQTWPLSQTANKKTGICSVCLAQRQLHSGDGKVHLHGPLDNRCPGSNQPPLQISAQAAASQPGLAVSDIRNKIRNRSCDSGSARQSSPPTAAPNSANLSRNSFSSQPLILEHPCLSRPTIKHIPKSARPACSAALIDAFRKIESDSSVLLYWSDLLLFASSVLQVPARTGKRHNLSSLIKKRLEGLGTSAPTEPVVERIKRAHHSHDSRASAVRSKMEDGNVSAAVRILCSDESPAQCNLNTFNILKAKHPPAASSSIMAPLPDSMETPPIQVSEQDVVKAVRSFPAGSAGGPDGLRPQHLLELVTCRESAGTFLTALTSFVNLLLRGVCPPEVQPVLFGGKLFALNKKSGGIRPIAVGYTWRRLAAKCANRYAVSALSEYLSPIQLGAGIPGGCEAAVHATRRFAESMPADHFVVKLDFCNAFNCLSRSRMLSEIHHRIPELYSFCHLAYSSPSWLKFGDWCIESQEGVQQGDPLGPMLFCLTIHPLLTSLSSDLTVGYLDDITLGGCESSIANDVQTIIDRGQEFGLQLNRTKCEVISSVCKSPGNSVLSSFVPMCLSHSSLLGAPLSGEEATTTALSSRLEDLKRTASRLKSLAAHDALTILRFSLSAPKLMHVLRSSPSFSNPRLLDYDEALRQCLCAVINADLSVLQWQQASLPVSMGGLGIRLVSHIAPSAFLASAMGTRQLQDAILHKCSLSADSSIDVALSVWSKSLTSSAPPSTSVSSQKSWDRPIVDRIYNSLLESQSNAVDRARLLAVSTKRSSVWLHALPVASCGLFLDNEAIRVAVSFRLGAKTCEPHMCPCGHEVDALGLHGLSCKRSSGRMSRHHNLNDIIWRALSRAGIPSSKEPSGLSRSDGKRPDGMTLVPWCNGKCAVWDVTVIDTMANSYLNTTSVTAGGAAVHAASRKLDKYRDLSLGYEVVPVAIETMGPMNPEGVDFIKA

SEQ ID NO: 33229 - protein, 991 aa, Enchytraeus crypticus
MPARQTWPLSQTANKKTGICSVCLAQRQLHSGDGKVHLHGPLDNRCPGSNQPPLQISAQAAASQPGLAVSDIRNRIRNRSCDSGSARQSSPPTAAPNSANLSRNSFSSQPLILEHPCLSRPTIKHIPKSARPACSAALIDAFRKIESDPSVLSYWSDLLLFASSVLQVPARTGKRHNLSSLIKKRLEGLGTSAPTEPVVERIKRAHHSHDSRASAVRSKMEDGNVSAAVRILCSDESPAQCTINTFNILKAKHPPAASSSIMAPLPDSMATPPIQVSEQDVVKAVRSFPAGSAGGPDGLRPQHLLELVTCRESAGTFLTALTSFVNLLLRGACPPEVQPVLFGGKLFALNKKSGGIRPIAVGYTWRRLAAKCANRYAVSALSEYLSPIQLGAGIPGGCEAAVHATRRFAESMPADHFVVKLDFCNAFNCLSRSRMLSEIHHRIPELYSFCHLAYSSPSWLKFGDWCIESQEGVQQGDPLGPMLFCLTIHPLLTSLSSDLTVGYLDDITLGGCESSIANDVQTIIDRGQEFGLQLNRTKCEVISSVCKSPGNSVLSSFVPMCLSHSSLLGAPLSGEEATTTALSSRLEDLKRTASRLKSLAAHDALTILRFSLSALKLMHVLRSSPSFSNPRLLDYDEALRQCLCAVINADLSVLQWQQASLPVSMGGLGIRLVSHIAPSAFLASAMGTRQLQDAILHKCSLSADSSIDVALSVWSKSLTSSAPPSTSVSSQKSWDRPIVDRIYNSLLESQSNAVDRARLLAVSTKRSSDWLHALPVASCGLFLDNEAIRVAVSFRLGAKTCEPHMCPCGHEVDALGLHGLSCKRSSGRMSRHHNLNDIIWRALSRAGIPSSKEPSGLSRSDGKRPDGMTLVPWCNGKCAVWDVTVIDTMANSYLNTTSVTAGGAAVHAASRKLDKYRDLSLGYEVVPVAIETMGPMNPEGVDFINGIGRLIAEQTGDKRETSFLWQRLSMTLQRFNAVCFNNSFKPFDDLE

SEQ ID NO: 33230 - protein, 991 aa, Enchytraeus crypticus
MPARQTWPLSQTANKKTGICSVCLAQRQLHSGDGRVHLHGPLDNRCPGSNQPPLQISAQAAASQPGLAVSDIRNKIRNRSCDSGSARQSSPPTAAPNSANLSRNSFSSQPLILEHPCLSRPTIKHIPKSARPACSAALIDAFRKIESDPSVLLYWSDLLLFASSVLQVPARTGKRHNLSSLIKKRLEGLGTSAPTEPVVERIKRAHHSHDSRASAVRSKMEDGNVSAAVRILCSDESPAQCNLNTFNILKAKHPPAASSSIMAPLPDSMETPPIQVSEQDVVKAVRSFPAGSAGGPDGLRPQHLLELVTCRESAGTFLTALTSFVNLLLRGVCPPEVQPVLFGGKLFALNKKSGGIRPIAVGYTWRRLAAKCANRYAVSALSEYLSPIQLGAGIPGGCEAAVHATRRFAESMPADHFVVKLDFCNAFNCLSRSRMLSEIHHRIPELYSFCHLAYSSPSWLKFGDWCIESQEGVQQGDPLGPMLFCLTIHPLLTSLSSDLTVGYLDDITLGGCESSIANDVRTIIDRGQEFGLQLNRTKCEVISSVCKSPGNSVLSSFVPMCLSHSSLLGAPLSGEEATTTALSSRLEDLKRTASRLKSLAAHDALTILRFSLSAPKLMHVLRSSPSFSNPRLLDYDEALRQCLCAVINADLSDLQWQQASLPVSKGGLGIRLVSHIAPSAFLASAMGTRQLQDAILHKCSLSADSSIDVALSVWSKSLTSSAPPSTSVSSQKSWDRPIVDRIYNSLLESQSNAVDRARLLAVSTKRSSDWLHALPVASCGLFLDNEAIRVAVSFRLGAKTCEPHMCPCGLEVDALGLHGLSCKRSSGRMSRHHNLNDIIWRALSRAGIPSYKEPSGLSRSDGKRPDGMTLVPWCNGKCAVWDVTVIDTMANSYLNTTSVTAGCAAVHAASRKLDKSRDLSLGYEVVPVAIETMGPMNPEGVDFINGIGRLIAEQTGDKRETSFFWQRLSMTLQRFNAVCFNNSFKPIDDLE

SEQ ID NO: 33231 - protein, 991 aa, Enchytraeus crypticus
MPARQTWPLSQTANKKTGICSVCLAQRQLHSGDGKVHLHGPLDNRCPGSNQPPLQISAQAAASQPGLAVSDIRNRIRNRSCDSGSARQSSPPTAAPNSANLSRNSFSSQPLILEHPCLSRPTIKHIPKSARPACSAALIDAFRKIESDPSVLSYWSDLLLFASSVLQVPARTGKRHNLSSLIKKRLEGLGTSAPTEPVVERIKRAHHSHDSRASAVRSKMEDGNVSAAVRILCSDESPAQCRLNTFNILKDKHPPAASSSIMAPLPDSMETPPIQVSEQDVVKAVRSFPAGSAGGPDGLRPQHLLELVTCRESAGTFLTALTSFVNLLLRGVCPPEVQPVLFGGKLFALNKKSGGIRPIAVGYTWRRLAAKCANRYAVSALSEYLSPIQLGAGIPGGCEAAVHATRRFAESMPADHFVVKLDFCNAFNCLSRSRMLSEIHHRIPELYSFCHLAYSSPSWLKFGDWCIESQEGVQQGDPLGPMLFCLTIHPLLTSLSSDLTVGYLDDITLGGCESSIANDVQTIIDRGQEFGLQLNRTKCEVISSVCKSPGNSVLSSFVPMCLSHSSLLGAPLSGEEATTTALSSRLEDLKRTASRLKSLAAHDALTILRFSLSAPKLMHVLRSSPSFSNPRLLDYDEALRQCLCAVINADLSVLQWQQASLPVSMGGLGIRLVSHIAPSAFLASAMGTRQLQDAILHKCSLSADSSIDVALSVWSKSLTSSAPPSTSVSSQKSWDRPIVDRIYNSLLESQSNAVDRARLLAVSTKRSSDWLHALPVASCGLFLDNEAIRVAVSFRLGAKTCEPHMCPCGHEVDALGLHGLSCKRSSGRMSRHHNLNDIIWRALSRAGIPSSKEPSGLSRSDGKRPDGMTLVPWCNGKCAVWDVTVIDTMANSYLNTTSVTAGGAAVHAASRKLDKYCDLSLGYEVVPVAIETMGPMNPEGVDFINGIGRLIAVQTGDKRETSFLWQRLSMTLQRFNAVCFNNSFKPIDDLE

SEQ ID NO: 33232 - protein, 935 aa, Enchytraeus crypticus
MPARQTWPLSQTANKKTGICSVCLAQRQLHSGDGKVHLHGPLDNRCPGSNQPPLQISAQAAASQPGLAVSDIRNRIRNRSCDSGSARQSSPPTAAPNSANLSRNSFSSQPLILEHPCLSRPTIKHIPKSARPACSAALIDAFRKIESDPSVLSYWSDLLLFASSVLQVPARTGKRHNLSSLIKKRLEGLGTSAPTEPVVERIKRAHHSHDSRASAVRSKMEDGNVSAAVRILCSDESPAQCTINTFNILKAKHPPAASSSIMAPLPDSMATPPIQVSEQDVVKAVRSFPAGSAGGPDGLRPQHLLELVTCRESAGTFLTALTSFVNLLLRGVCPPEVQPVLFGGKLFALNKKSGGIRPIAVGYTWRRLAAKCANRYAVSALSEYLSPIQLGAGIPGGCEAAVHATRRFAESMPADHFVVKLDFCNAFNCLSRSRMLSEIHHRIPELYSFCHLAYSSPSWLKFGDWCIESQEGVQQGDPLGPMLFCLTIHPLLTSLSSDLTVGYLDDITLGGCESSIANDVQTIIDRGQEFGLQLNRTKCEVISSVCKSPGNSVLSSFVPMCLSHSSLLGAPLSGEEATTTALSSRLEDLKRTASRLKSLAAHDALTNLRFSLSAPKLMHVLRSSPSFSNPRLLDYDEALRQCLCAVINADLSVLQWQQASLPVSMGGLGIRLVSHIAPSAFLASAMGTRQLQDAILHKCSLSADSSIDVALSVWSKSLTSSAPPSTSVSSQKSWDRPIVDRIYNSLLESQSNAVDRARLLAVSTKRSSDWLHALPVASCGLFLDNEAIRVAVSFRLGAKTCEPHMCPCGHEVDALGLHGLSCKRSSGRMSRHHNLNDIIWRALSRAGIPSSKEPSGLSRSDGKRPDGMTLVPWCNGKCAVWDVTVIDTMANSYLNTTSVTAGGAAVHAASRKLDKYRDLSLDMKLFRWLLKPWAR

SEQ ID NO: 33233 - protein, 912 aa, Enchytraeus crypticus
MSIARSHSRAVQTSTLSVSDHFSSTRTTSQSINQYEFNNNNNNQNHIPKSARPACSAALIDAFRKIESDPSVLSYWSDLLLFASSVLQVPARTGKRHNLSSLIKKRLEGLGTSAPTEPVVERIKRAHHSHDSRASAVRSKMEDGNVSAAVRILCSDESPAQCTINTFNILKAKHPPTASSSIMAPLPDSTATPPIQVSEQDVVKAVRSFPAGSAGGPDGLRPQHLLELVTCRESAGTFLTALTSFVNLLLRGACPPEVQPVLFGGKLFALNKKSGGIRPIAVGYTWRRLAAKCANRYAVSALSEYLSPIQLGAGIPGGCEAAVHATRRFAESMPADHFVVKLDFCNAFNCLSRSRMLSEIHHRIPELYSFCHLAYSSPSWLKFGDWCIESQEGVQQGDPLGPMLFCLTIHPLLTSLSSDLTVGYLDDITLGGCESSIANDVQTIIDRGQEFGLQLNRTKCEVISSVCKSPGNSVLSSFVPMCLSHSSLLGAPLSGEEATTTALSSRLEDLKRTASRLKSLAAHDALTILRFSLSAPKLMHVLRSSPSFSNPRLLDYDEALRQCLCAVINADLSVLQWQQASLPVSMGGLGIRLVSHIAPSAFLASAMGTRQLQDAILHKCSLSADSSIDVALSVWSKSLTSSAPPSTSVSSQKSWDRPIVDRIYNSLLESQSNAVDRARLLAVSTKRSSDWLHALPVASCGLFLDNEAIRVAVSFRLGAKTCEPHMCPCGHEVDALGLHGLSCKRSSGRMSRHHNLNDIIWRALSRAGIPSSKEPSGLSRSDGKRPDGMTLVPWCNGKCAVWDVTVIDTMANSYLNTTSVTAGGAAVHAASRKLDKYRDLSLGYEVVPVAIETMGPMNPEGVDFINGIGRLIAEQTGDKRETSFLWQRLSMTLQRFNAVCFNNSFKPIDDLE

SEQ ID NO: 33234 - protein, 991 aa, Enchytraeus crypticus
MPARQTWPLSQTANKKTGICSVCLAQRQLHSGDGKVHLHGPLDNRCPGSNQPPLQISAQAAASQPGLAVSDIRNRIRNRSCDSGSARQSSPPTAAPNSANLSRNSFSSQPLILEHPCLSRPTIKHIPKSARPACSAALIDAFRKIESDPSVLSYWSDLLLFASSVLQVPARTGKRHNLSSLIKKRLEGLGTSAPTEPVVERIKRAHHSHDSRASAVRSKMEDGNVSAAVRILCSDESPAQCTINTFNILKAKHPPAASSSIMAPLPDSMATPPIQVSEQDVVKAVRSFPAGSAGGPDGLRPQHLLELVTCRESAGTFLTALTSFVNLLLRGACPPEVQPVLFGGKLFALNKKSGGIRPIAVGYTWRRLAAKCANRYAVSALSEYLSPIQLGAGIPGGCEAAVHATRRFAESMPADHFVVKLDFCNAFNCLSRSRMLSEIHHRIPELYSFCHLAYSSPSWLKFGDWCIESQEGVQQGDPLGPMLFCLTIHPLLTSLSSDLTVGYLDDITLGGCESSIANDVQTIIDRGQEFGLQLNRTKCEVISSVCKSPGNSVLSSFVPMCLSHSSLLGAPLSGEEATTTALSSRLEDLKRTASRLKSLAAHDALTILRFSLSAPKLMHVLRSSPSFSNPRLLDYDEALRQCLCAVINADLSVLQWQQASLPVSMGGLGIRLVSHIAPSAFLASAMGTRQLQDAILHKCSLSADSSIDVALSVWSKSLTSSAPPSTSVSSQKSWDRPIVDRIYNSLLESQSNAVDRARLLAVSTKRSSDWLHALPVASCGLFLDNEAIRVAVSFRLGAKTCEPHMCPCGHEVDALGLHGLSCKRSSGRMSRHHNLNDIIWRALSRAGIPSSKEPSGLSRSDGKRPDGMTLVPWCNGKCAVWDVTVIDTMANSYLNTTSVTAGGAAVHAASRKLDKYRDLSLRYEVVPVAIETMGPMNPEGVDFINGIGRLIAEQTGDKRETSFLWQRLSMTLQRFNAVCFNNSFKPIDDLE

SEQ ID NO: 33235 - protein, 991 aa, Enchytraeus crypticus
MPARQTWPLSQTANKKTGICSVCLAQRQLHSGDGRVHLHGPLDNRCPGSNQPPLQISAQAAASQPGLAVSDIRNKIRNRSCDSGSARQSSPPTAAPNSANLSRNSFSSQPLILEHPCLSRPTIKHIPKSARPACSAALIDAFRKIESDPSVLLYWSDLLLFASSVLQVPARTGKRHNLSSLIKKRLEGLGTSAPTEPVVERIKRAHHSHDSRASAVRSKMEDGNVSAAVRILCSDESPAQCTINTFNILKAKHPPAASSSIMAPLPDSMETPPIQVSEQDVVKAVRSFPAGSAGGPDGLRPQHLLELVTCRESAGTFLTALTSFVNLLLRGVCPPEVQPVLFGGKLFALNKKSGGIRPIAVGYTWRRLAAKCANRYAVSALSEYLSPIQLGAGIPGGCEAAVHATRRFAESMPADHFVVKLDFCNAFNCLSRSRMLSEIHHRIPELYSFCHLAYSSPSWLKFGDWCIESQEGVQQGDPLGPMLFCLTIHPLLTSLSSDLTVGYLDDITLGGCESSIANDVRTIIDRGQEFGLQLNRTKCEVISSVCKSPGNSVLSSFVPMCLSHSSLLGAPLSGEEATTTALSSRLEDLKRTASRLKSLAAHDALTILRFSLSAPKLMHVLRSSPSFSNPRLLDYDEALRQCLCAVINADLSDLQWQQASLPVSMGGLGIRLVSHIAPSAFLASAMGTRQLQDAILHKCSLSADSSIDVALSVWSKSLTSSAPPSTSVSSQKSWDRPIVDRIYNSLLESQSNAVDRARLLAVSTKRSSDWLHALPVASCGLFLDNEAIRVAVSFRLGAKTCEPHMCPCGLEVDALGLHGLSCKRSSGRMSRHHNLNDIIWRALSRAGIPSYKEPSGLSRSDGKRPDGMTLVPWCNGKCAVWDVTVIDTMANSYLNTTSVTAGGAAVHAASRKLDKYRDLSLGYEVVPVAIETMGPMNPEGVDFINGIGRLIAEQTGDKRETSFLWQRLSMTLQRFNAVCFNNSFKPIDDLE

SEQ ID NO: 33236 - protein, 991 aa, Enchytraeus crypticus
MPARQTWPLSQTANKKTGICSVCLAQRQLHSGDGKVHLHGPLDNRCPGSNQPPLQISAQAAASQPGLAVSDIRNRIRNRSCDSGSARQSSPPTAAPNSANLSRNSFSSQPLILEHPCLSRPTIKHIPKSARPACSAALIDAFRKIESDPSVLSYWSDLLLFASSVLQVPARTGKRHNLSSLIKKRLEGLGTSAPTEPVVERIKRAHHSHDSRASAVRFKIEDGNVSAAVRILCSDESPAQCTINTFNILKAKHPPAASSSIMAPLPDSMATPPIQVSEQDVVKAVRSFPAGSAGGPDGLRPQHLLELVTCRESAGTFLTALTSFVNLLLRGACPPEVQPVLFGGKLFALNKKSGGIRPIAVGYTWRRLAAKCANRYAVSALSEYLSPIQLGAGIPGGCEAAVHATRRFAESMPADHFVVKLDFCNAFNCLSRSRMLSEIHHRIPELYSFCHLAYSSPSWLKFGDWCIESQEGVQQGDPLGPMLFCLTIHPLLTSLSSDLTVGYLDDITLGGCESSIANDVQTIIDRGQEFGLQLNRTKCEVISSVCKSPGNSVLSSFVPMCLSHSSLLGAPLSGEEATTTALSSRLEDLKRTASRLKSLAAHDALTILRFSLSAPKLMHVLRSSPSFSNPRLLDYDEALRQCLCAVINADLSVLQWQQASLPVSMGGLGIRLVSHIAPSAFLASAMGTRQLQDAILHKCSLSADSSIDVALSVWSKSLTSSAPPSTSVSSQKSWDRPIVDRIYNRLLESQSNAVDRARLLAVSTKRSSDWLHALPVASCGLFLDNEAIRVAVSFRLGAKTCEPHMCPCGHEVDALGLHGLSCKRSSGRMSRHHNLNDIIWRALSRAGIPSSKEPSGLSRSDGKRPDGMTLVPWCNGKCAVWDVTVIDTMANSYLNTTSVTAGGAAVHAASRKLDKYRDLSLGYEVVPVAIETMGPMNPEGVDFINGIGRLIAEQTGDKRETSFLWQRLSMTLQRFNAVCFNNSFKPIDDLE

SEQ ID NO: 33237 - protein, 773 aa, Aricia agestis
MSFPPGSAGGLDGITSQHLKDLTSGCCGDAGEKLLQEVTNLCNLMLRGEVASDIVDILYGANLCALRKRDGGIRPIAVGSTYRRLTAKIACRSIKSLSSYFQPKQLGFACKGGCEAAVHSFRTHVQNSKNSIYLKVDVSNAFNSVDRVAMLTQIKTKAPTILPFMLQCYRDPTKLIYQNHLIQSEVGCQQGDPLGPAIFSLAIHPVIELLNSKFNVWYLDDGTLASDASTVLSDFQTLIREFKIIGLDLNLGKCELFVPDDCGDRDEIISSFKAVAPELSVIEKSSLFLLGSPVLADSFPDYINEKTRNFSESLDRLLQINSHMAFTLIRYCLFVPKFTYALRCCQLWKFPELLHSLDDTLKHTLSTILNIKFDERSWTQATLPVRFGGLGIRKTSDTALPAFLSSVHANRAVIAKILEPSSCPFVIPFADEAKDAWDIASAGSEVPKNTSSQRLWDEPICELVRNKLFNTSTSAVERARLLAVERWESGAWLQALPSKNTGTLLDRNTFRLATALRLGVPHVVPHQCVCGARVDSYGHHGLCCSRSAGRFSRHHNLNDLIRRALVTAGVPAILEPSGLARDDGRRPDGMTLVPWNVGRALVWDATCVDTLASSHIQSTSSCAGAAANQAENLKRRKYENLSGDLIRVFEPFGVETLGAWGPGAHKLFRGISKKLVEATRDPRAGSYLAQRIAIAIQRGNAVSLLGTLPDGDDLGKFFFLKFVYIIYLYILDSILVFTFLSYMDIQIIKTWLKSVKPFRRSTRTNIVTREFFK

SEQ ID NO: 33238 - protein, 957 aa, Lysandra coridon
MLSNSQDAGTSSDDAILPLESLVHCSQCPQPRCFRSERGLRIHIGKCHKQTVLPSPSEASVPPSQNSAREPFWKTISNLKQSVPVLRRIPRGARVAVAQKLAESIRQTVNDNSRQAWEKLLTFPYRTLHVIRDPQNNASLTSRVKKNCTTEIDLTQHFSLGPSTKNNIVKNVENKISEGDIKGAARLLFSSDTIAPNSPETVLALQNKHPQQLTSQPFSDAHDVAPPFQTTVDSVREAIMSFPPGSAGGLDGITPQHLKDLTSGCCGDAGEKLLQEVTNLCNLMLRGEVASDIVDILYGANLCALRKRDGGIRPIAVGSTYRRLTAKIACRSMNSLSSYFQPKQLGFACKGGCEAAVHSFRTHIQNSKNTVYLKVDVKNAFNSVDRVAMLTQIKTKAPTILPFMLQCYQEPTKLIYRNHLIQSEVGCQQGDPLGPAIFSLAIHPVIELLNSKFNVWYLDDGTLASGPSTVLSDFQTLIREFKIIGLDLNLEKCELFVPDDCENRNEIISNFKAVAPELSVTEKSSLFLLGSPILADSFPDYINEKIQNFSESLDRLLQINSHMAFTLIRHCLFVPKFTYVLRCCQLWKFPQLLHSLDDTLKHTLSTILNIKFDERSWTQATLPVRFGGLGIRKTFDVALPAFLSSVHANRQVIAKILEPSSCPLDIPFADEAKDAWDIACAGSEVPVNTSSQRLWDGPVCELVRNKLLNTSTSVAERARLLAVERWESGAWLQALPSKNTGTLLDRNTFRLATALRLGAPHVVPHQCVCGTHVDSYGHHGLCCLRSAGRFSRHHSLNDLIRRALVTAGVPAILEPSGLVRDDGKRPDGMTLVPWNVGRALVWDATCVDTLAPSHVQGTSSCAGAAANQAENLKRRKYENLGGDFIFEPFGVETLGAWGPGAHKLFSEISKRLIEATRDPRAGSYLAQRIAIAIQRGNAVSLLGTLPDGDDLGKFFFL

SEQ ID NO: 33239 - protein, 961 aa, Glaucopsyche alexis
MQTSLHLGSSQDVGTSTDTVTVPLENLVQCLQCPQPRYFKSERGLRIHIGKCHKQSLAPSPSVVLSSQISTEHQPFWQEISKLKNSVPILRRIPRGARVAVAQKLAETVHKTVSENSRQAWENLFTFPYRILHVTRNPHNNVSLTSLVKKNCNSDFDLNLNFSLPSSTKNNILKNVENKISEGDIKGAARLLFSNDTIAPNSPETLTALQNKHPPQLSPQLFPDTDDVEPALQTSVDSVRGAIMSFLPGSAGGLDGLTPQHLKDLTSGCCGEAGEKLLQEVTNLCNLMLRGGVASDVVDILYGANLCALRKRDGGIRPIAVGSTYRRLTAKIACRSINTLASYFQPKQLGFACKGGCEAAVHSFRTFIKNQNDSVFLKVDVKNAFNSVNRVAMLAQVKAKAPAILPFMLQCYKEPTKLIYKNHLVSSEVGCQQGDPLGPAIFSLAIHPAIELLNSKFNVWYLDDGTLGSDASTVLSDFRTLIHEFQNIGLELNFGKCELFVPDNCEDREAVISSFKEVAPQLSVIEKGSLLLLGSPILDDSLPEFINNKLQNFSETLDRLLQINCHMAFTLIRYCLFVPKFTYVLRCCQLWKFPQLLKRLDDTIKHTLSSILNINFDHRSWTQATLPVRFGGLGIRQTSDVALPAFLSSVHANHAVILKILERSSCPLAIPFADEAKNAWDIASAGSNVPENTFSQRLWDEPICRLVRNRLFNTSSSPAERARLLAVEKWESGVWLQALPSANTGTLLGRNTFRLATALRLGAPHVVPHQCVCGANVDSHGYHGLCCSRSAGRISRHHSLNDLIRRALVTAGVPAILEPSGLARDDGKRPDGMTLVPWSVGRALVWDATCVDTLAPSHIQGTSSCAGAAANQAENLKRRKYENLSGDLIFEPFGVETLGAWGPGAHKLFKEISKKLTEATRDPRAGNYLAQRIAIAIQRGNAISLLGTLPDGDDLGKIFYL

SEQ ID NO: 33240 - protein, 958 aa, Lysandra bellargus
MLRNSQDAGTSTDDAILPLENLVQCSQCPQPRYFRSERGLRIHIGKCHKQPLLSSPSETSVPPSQNSTAREPFWQTLSKLKHSVPVLRRIPRGARVAVAQKLAETIHKTVNENSRQAWVNLLTFSYHTLHVTRDPQNNASLTSRVKKNCVTEIELNQHFSLGSSTKNNIVKHVEDKISEGDIKGAARLLFSSDTIAPNSPETVLALQNKQPHQLSSQPFSDAHDVAPPLQTSVDSVRGAIMSFPPGSAGGLDGITPQHLKDLTSGCCGDAGEKLLQEVTNLCKLMLRGDVASDIVDILYGANLCALRKRDGGIRPIAVGSTYRRLTAKIACRSINSLSSYFQPKQLGFACKGGCEAAVHSFRTHIQNSKNTVYLKVDVKNAFNSVDRVAMLTQIKTKAPTILPFMLQCYREPTKLIYQNHLIQSEVGCQQGDPLGPAIFSLAIHPVIELLNSKFNVWYLDDGTLASDASTVLSDFQTLIHEFKIIGLDLNLGKCELFVPDDCEDRDGIVSSFKAVAPELSVIEKSSLFLLGSPILADSFPDYIKEKVQNFSESLDRLLQINSHMAFTLIRYCLFVPKLTYVLRCCQLWKFSQLLHSLDDTLKHTLSTILNINFDERSWTQATLPVRFGGLGVRKISDIALPAFLSSFHANRAVIAKILEPSSCPLVIPFADEAKDAWNIASAGSRVPENTSSQRLWDGPVCELVRNKLFNTSTSVAERARLLAVERWESGAWLRALPSKNIGTLLDRNTFRLATALRLGAPHVVPHQCVCGAHVDSYGHHGLCCSRSAGRFTRHHNLNDLIRRALVTAGVPAILEPSGLARDDGKRPDGMTLVPWNMGRALVWDATCVDTLASSHVQGTSSCAGAAANQAENLKRRKYENLSGDLIFEPFGVETLGAWGPGAHKVFREISKRLIEATRDPRAGSYLAQRIAIAIQRGNAVSLLGTLPDGDDMGKFFFL

SEQ ID NO: 33241 - protein, 674 aa, Bembecia ichneumoniformis
MLRGEVTSDIVDVLYGANLCALRKRDGGIRPIAVGSTYRRLTAKIACKSVNFLSSYFQPKQLGFACKGGCEAAVHSFRSAILNQGGDVFLKVDVKNAFNSVNRVAMLAQIKSKAPAILPFMIQCYNDPTKLLYKNHLISSEVGCQQGDPLGPAIFSLAIHPVIELLNSKFNVWYLDDGTLGSDASIVLSDFRTLILEFQNIGLDLNFAKCELFVTDNCVDRDAVISSFKEIAPQLSVIDKKSLHLLGSPILDESLPDFINSKLQNFSEILDRLLKINSHMAFSLIRYCLFVPKFTYVLRCCQLWKFPQLLSCLDNTIRHTLSSILNIRFDHRSWTQATLPIRFGGLGVRKTSDVSLPAFLSSTHANHALIYQILGRSSCSVPVPYTDEAKDAWRIACANSDIPVNTSSQRLWDEPLCRLLQNNLINTSSSPAERARLLAVEKWESGLWLKALPSPNTGTLLDPTTFRLATALHLGAPHVIPHRCVCGTNVDSLGHHGLSCQRSAGRISRHHTLNDLIRRALVTAGVPAILEPSGLARDDGRRPDGMTLVPWKAGRPLVWDATCVDTLAPSHLQGTSNIAGAAANHAENLKRHKYENLSGDFIFVPFGVETLGTWGPGAHKLFREISKKLTETTRDPRAGNYLAQRISLTIQRGNALSLLGTLPDGDGLGLFFNL

SEQ ID NO: 33242 - protein, 958 aa, Lysandra coridon
MLRNSQDAGTSTDDAILPLENLVQCSQCPQPRYFRSERGLRIHIGKCHKQPLLSSPSETSVPPSQNSTAREPFWQTLSKLKHSVPVLRRIPRGARVAVAQKLAETIHKTVNENSRQAWENLLTFSYHTLHVTRDPQNNASLTSRVKKNCVTEIELNQHFSLGSSTKNNIVKHVEDKISEGDIKGAARLLFSSDTIAPNSPETVLALQNKHPHQLSSQPFSDAHDVAPPLQTSVDSVRGAIMSFPPGSAGGLDGITPQHLKDLTSGCCGDAGEKLLQEVTNLCNLMLRGDVASDIVDILYGANLCALRKRDGGIRPIAVGSTYRRLTAKIACRSMNSLSSYFQPKQLGFACKGGCEAAVHSFRTHIQNSKNTVYLKVDVKNAFNSVDRVAMLTQIKTKAPTILPFMLQCYREPTKLIYQNHLIQSEVGCQQGDPLGPAIFSLAIHPVIELLNSKFNVWYLDDGTLASDASTVLSDFQTLIHEFKIIGLDLNLGKCELFVPDDCEDRDGIVSSFKAVAPELSVIEKSSLFLLGSPILADSFPDYIKEKVQNFSESLDRLLQINSHMAFTLIRYCLFVPKLTYVLRCCQLWKFPQLLHSLDDTLKHTLSTILNINFDERSWTQATLPVRFGGLGVRKISDIALPAFLSSFHANRAVIAKILEPSSCPLVIPFADEAKDAWNIASAGSRVPENTSSQRLWDGPVCELVRNKLFNTSTSVAERARLLAVERWESGAWLRALPSKNIGTLLDRNTFRLATALRLGAPHVVPHQCVCGAHVDSYGHHGLCCSRSAGRFTRHHNLNDLIRRALVTAGVPAILEPSGLARDDGKRPDGMTLVPWNMGRALVWDATCVDTLASSHVQGTSSCAGAAANQAENLKRRKYENLSGDLIFEPFGVETLGAWGPGAHKVFREISKRLIEATRDPRAGSYLAQRIAIAIQRGNAVSLLGTLPDGDDMGKFFFL

SEQ ID NO: 33243 - protein, 956 aa, Lysandra coridon
MLRNSQDAGTSTDDAILPLENLVQCSQCPQPRYFRSERGLRIHIGKCHKQPLLSSPSETSVPPSQNSNQPFWQTLSKLKHSVPVLRRIPRGARVAVAQKLAETIHKTVNENSRQAWENLLTFSYHTLHVTRDPQNNASLTSRVKKNCVTEIELNQHFSLGSSTKNNIVKHVEDKISEGDIKGAARLLFSSDTIAPNSPETVLALQNKHPHQLSSQPFSDAHDVAPPLQTSVDSVRGAIMSFPPGSAGGLDGITPQHLKDLTSGCCGDAGEKLLQEVTNLCNLMLRGDVASDIVDILYGANLCALRKRDGGIRPIAVGSTYRRLTAKIACRSMNSLSSYFQPKQLGFACKGGCEAAVHSFRTHIQNSKNTVYLKVDVKNAFNSVDRVAMLTQIKTKAPTILPFMLQCYREPTKLIYQNHLIQSEVGCQQGDPLGPAIFSLAIHPVIELLNSKFNVWYLDDGTLASDASTVLSDFQTLIHEFKIIGLDLNLGKCELFVPDDCEDRDGIVSSFKAVAPELSVIEKSSLFLLGSPILADSFPDYIKEKVPNFSASLDRLLQINSHMAFTLIRYCLFVPKLTYVLRCCQLWKFPQLLHSLDDTLKHTLSTILNINFDERSWTQATLPVRFGGLGVRKISDIALPAFLSSFHANRAVIAKILEPSSCPLVIPFADEAKDAWNIASAGSRVPENTSSQRLWDGPVCELVRNKLFNTSTSVAERARLLAVERWESGAWLRALPSKNIGTLLDRNTFRLATALRLGAPHVVPHQCVCGAHVDSYGHHGLCCSRSAGRFTRHHNLNDLIRRALVTAGVPAILEPSGLARDDGKRPDGMTLVPWNMGRALVWDATCVDTLASSHVQGTSSCAGAAANQAENLKRRKYENLSGDLIFEPFGVETLGAWGPGAHKVFREISKRLIEATRDPRAGSYLAQRIAIAIQRGNAVSLLGTLPDGDDMGKFFFL

SEQ ID NO: 33244 - protein, 718 aa, Glaucopsyche alexis
MSFLPGSAGGLDGLTPQHLKDLTSGCCGEAGEKLLQEVTNLCNLMLRGGVASDIVDILYGANLCALRKRDGGIRPIAVGSTYRRLTAKIACRSINSLASYFQPKQLGFACKGGCEAAVHSFRTFIKNQNNSVFLKVDVKNAFNSVNRVAMLAQIKAKAPAILPFMLQCYKEPTKLIYKNHLIPSEVGCQQGDPLGPAIFSLAIHPAIELLNSKFNVWYLDDGTLGSDASTVLSDFRTLIHEFQNIGLELNFGKCELFVPDNCEDRETVISRFKEVAPQLSVIEKGSLLLLGSPILDDSLPDFINNKLQNFTETLDRLLQINCHMAFTLIRYCLFVPKFTYVLRCCQLWKFPQLLKRLDDTIKHTLSSILNIKFDHRSWTQATLPVRFGGLGIRQTSDVALPAFLSSVHANHAVILKILERSSCPLVIPFADEAKDAWDIASAGSNVPENTFSQRLWDEPICRLVRNRLFNTSSSPVDRARLLAVEKWESGVWLQALPSANTGTLLGRNTFRLATALRLGAPHVVPHQCVCGANVDSHGHHGLCCSRSAGRISRHHSLNDLIRRALVTAGVPAILEPSGLARDDGKRPDGMTLVPWSVGRALVWDATCVDTLAPSHVQGTSNCAGAAANQAENLKRRKYENLSGDLIFEPFGVETLGAWGPGAHKLFKEISKKLTEATRDPRAGNYLAQRIAIAIQRGNAISLLGTLPDGDDLGKFFYL

SEQ ID NO: 33245 - protein, 963 aa, Bembecia ichneumoniformis
MLSRSQDAGTSTDNATVSSENLVQCLQCPQIRYFKSERGLRIHIGKCHKQRPVQTAILTPPHNSTPHQQPFWQEISTLKHSIPILKRIPKGARVAVAHNLAQAVHNTVRDNSRQAWEKLLSFPYRILHITRDPHNSASLTSRVKKNCNSNNDLNQSFSFSSSPKYNLFKSVENKISEGDIKGAARLLFSNDTIASNCSETLTALQNKHPRFQSSKFQLPPNFFQANDDVTTPPLQTSAEKVRGAIISFPPGSAGGLDGLTPQHLKDLTSGCCGEAGETLLQELTSLCNLMLRGEVTSDIVDVLYGANLCALRKRDGGIRPIAVGSTYRRLTAKIACKSVNFLSSYFQPKQLGFACKGGCEAAVHSFRSAILNQGGDVFLKVDVKNAFNSVNRVAMLAQIKSKAPAILPFMIQCYNDPTKLLYKNHLISSEVGCQQGDPLGPAIFSLAIHPVIELLNSKFNVWYLDDGTLGSDASIVLSDFRTLILEFQNIGLDLNFAKCELFVTDNCVDRDAVISSFKEIAPQLSVIDKKSLHLLGSPILDESLPDFINSKLQNFSEILDRLLKINSHMAFSLIRYCLFVPKFTYVLRCCQLWKFPQLLSCLDNTIRHTLSSILNIRFDHRSWTQATLPIRFGGLGVRKTSDVSLPAFLSSTHANHALIYQILGRSSCSVPVPYTDEAKDAWRIACANSDIPVNTSSQRLWDEPLCRLLQNNLINTSSSPAERARLLAVEKWESGLWLKALPSPNTGTLLDPTTFRLATALHLGAPHVIPHRCVCGTNVDSLGHHGLSCQRSAGRISRHHTLNDLIRRALVTAGVPAILEPSGLARDDGRRPDGMTLVPWKAGRPLVWDATCVDTLAPSHLQGTSNIAGAAANHAENLKRHKYENLSGDFIFVPFGVETLGTWGPGAHKLFREISKKLTETTRDPRAGNYLAQRISLTIQRGNALSLLGTLPDGDGLGLFFNL

SEQ ID NO: 33246 - protein, 958 aa, Lysandra coridon
MLRNSQDAGTSTDDAILPLENLVQCSQCPQPRYFRSERGLRIHIGKCHKQPLLSSPSETSVPPSQNSTAREPFWQTLSKLKHSVPVLRRIPRGARVAVAQKLAETIHKTVNENSRQAWENLLTFSYHTLHVTRDPQNNASLTSRVKKNCVTEIELNQHFSLGSSTKNNIVKHVEDKISEGDIKGAARLLFSSDTIAPNSPETVLALQNKHPHQLSSQPFSDAHDVAPPLQTSVDSVRGAIMSFPPGSAGGLDGITPQHLKDLTSGCCGDAGEKLLQEVTNLCNLMLRGDVASDIVDILYGANLCALRKRDGGIRPIAVGSTYRRLTAKIACRSMNSLSSYFQPKQLGFACKGGCEAAVHSFRTHIQNSKNTVYLKVDVKNAFNSVDRVAMLTQIKTKAPTILPFMLQCYREPTKLIYQNHLIQSEVGCQQGDPLGPAIFSLAIHPVIELLNSKFNVWYLDDGTLASDASTVLLDFQTLIHEFKIIGLDLNLGKCELFVPDDCEDRDGILSSFKAVAPELSVIEKSSLFLLGSPILADSFPDYIKEKVQNFSESLDRLLQINSHMAFTLIRYCLFVPKLTYVLRCCQLWKFPQLLHSLDDTLKHTLSTILNINFDERSWTQATLPVRFGGLGVRKISDIALPAFLSSFHANRAVIAKILEPSSCPLVIPFADEAKDAWNIASAGSRVPENTSSQRLWDGPVCELVRNKLFNTSTSVAERARLLAVERWESGAWLRALPSKNIGTLLDRNTFRLATALRLGAPHVVPHQCVCGAHVDSYGHHGLCCSRSAGRFTRHHNLNDLIRRALVTAGVPAILEPSGLARDDGKRPDGMTLVPWNMGRALVWDATCVDTLASSHVQGTSSCAGAAANQAENLKRRKYENLSGDLIFEPFGVETLGAWGPGAHKVFREISKRLIEATRDPRAGSYLAQRIAIAIQRGNAVSLLGTLPDGDDMGKFFFL

SEQ ID NO: 33247 - protein, 957 aa, Lysandra coridon
MLSNSQDAGTSSDDAILPLESLVHCSQCPQPRCFRSERGLRIHIGKCHKQTVLPSPSEASVPPSQNSAREPFWKTISNLKQSVPVLRRIPRGARVAVAQKLAESIRQTVNDNSRQAWEKLLTFPYRTLHVIRDPQNNASLTSRVKKNCTTEIDLTQHFSLGPSTKNNIVKNVENKISEGDIKGAARLLFSSDTIAPNSPETVLALQNKHPQQLTSQPFSDAHDVAPPFQTTVDSVREAIMSFPPGSAGGLDGITPQLLKDLTSGCCGDAGEKLLQEVTNLCNLMLRGEVASDIVDILYGANLCALRKRDGGIRPIAVGSTYRRLTAKIACRSMNSLSSYFQPKQLGFACKGGCEAAVHSFRTHIQNSKNTVYLKVDVKNAFNSVDRVAMLTQIKTKAPTILPFMLQCYQEPTKLIYRNHLIQSEVGCQQGDPLGPAIFSLAIHPVIELLNSKFNVWYLDDGTLASGPSTVLSDFQTLIREFKIIGLDLNLEKCELFVPDDCENRNEIISNFKAVAPELSVTEKSSLFLLGSPILADSFPDYINEKIQNFSESLDRLLQINSHMAFTLIRHCLFVPKFTYVLRCCQLWKFPQLLHSLDDTLKHTLSTILNIKFDERSWTQATLPVRFGGLGIRKTFDVALPAFLSSVHANRQVIAKILEPSSCPLDIPFADEAKDAWDIASAGSEVPVNTSSQRLWDGPVCELVRNKLLNTSTSVAERARLLAVERWESGAWLQALPSKNTGTLLDRNTFRLATALRLGAPHVVPHQCVCGTHVDSYGHHGLCCLRSAGRFSRHHSLNDLIRRALVTAGVPAILEPSGLVRDDGKRPDGMTLVPWNVGRALVWDATCVDTLAPSHVQGTSSCAGAAANQAENLKRRKYENLGGDFIFEPFGVETLGAWGPGAHKLFSEISKRLIEATRDPRAGSYLAQRIAIAIQRGNAVSLLGTLPDGDDLGKFFFL

SEQ ID NO: 33248 - protein, 954 aa, Glaucopsyche alexis
MLSSSQDVGTSTDDVTVPLENLVQCLQCPQPRYFKSERGLRIHIGKCHKQSLAPSPSVFLSSQISTEHQPFWQEISKLKNSVPILRRIPRGARVAVAQKLAETVHKTVSENSKQAWEHLFTFPYRILHVTRDPHNNASLTSLVKKNCVSDFDSNLNFSLPSSTKNNILKNVENKINEGDIKGAARLLFSNDTIAPNSPETLTALQNKHPPQLLPQLFPDTDNAEPALQTSVDSVRGAIMSFLPGSAGGLDGLTSQHLKDLTSGCCGEAGEKLLQEVTNLCNLMLRGGVASDVVDILYGANLCALRKRDGGIRPIAVGSTYRRLTAKIACRSINLLASYFQPKQLGFACKGGCEAAVHSFRTFIQNQNDSVFLKVDVKNAFNSVNRVAMLAQIKAKAPAILPFMLQCYKEPTKLIYKNNLVSSEVGCQQGDPLGPAIFSLAIHPAIELLNSKFNVWYLDDGTLGSEASTVLSDFRTLIHEFQNIGLELNFGKCELFVPDNCEDREAVISSFKEVAPQLSVIEKGSLLLLGSPILDDSLPEFINNKLQNFSENLDRLLQINCHMAFTLIRYCLFVPKFTYVLRCCQLWKFPQLLKRLDDTIKHTLSSILNINFDHRSWTQATLPVRFGGLGIRQTSDVALPAFLSSVHANHAVILKILERSSCPLVIPFADEAKDAWDIASAGSNVPENTFSQRLWDEPICRLVRNRLFNTSSSPAERARLLAVEKWESGVWLQALPSANTGTLLGRNTLRLATALRLGAPHVVPHQCVCGANVDSHGYHGLCCSRSAGHISRHHSLNDLIRRALVTAGVPAILEPSGLARDGGKRPDGMTLVPWSVGRALVWDATCVDTLAPSHIQGTSNCAGAAANQAENLKRRKYENLSGDLIFEPFGVETLGAWGPGAHKLFKEISKKLTEATRDPRTGNYLAQRIAIQRGNAISLLGTLPDGDDLGKFFYL

SEQ ID NO: 33249 - protein, 957 aa, Cyaniris semiargus
MLSTSQDAGTSTDDAIVPLEILVQCTHCPQPRYFRSERGLRIHIGKCHKESLLSSPSEASVSPSQSSTAREPFWQTISKLKQSVPVLRRIPRGARVAVAQKLAETIHKTVNENSRQAWENLLTFPYRTLHVIRDPQNNTSLTSRVKKNCATDIDLNQNFPLCSSAKNNIVKNVENKISEGDIKGAARLLFSSDTIAPNSPETVSALQKKHPHQLTSQNISDAHDAPPLQTTVDSVRGAIMSFPPGSAGGLDGITPQHLKDLTSGCCGDAGEKLLQEVTNLCNLMLRGEVASDIVDILYGANLCALRKRDGGIRPIAVGSTYRRLTAKIACRSIKSLSSYFQPKQLGFACKGGCEAAVHSFRTHIQNSKNSIYLKVDVRNAFNSIDRVAMLTQIKTKAPTILPFMLQCYREPTKLIYQNHLIQSEVGCQQGDPLGPAIFSLAIHPVIELLNSKFNVWYLDDGTLAGDASTVLSDFQTLIREFKIIGLDLNLGKCELFVPDDCEDRDEIISSVKAVAPELSVIEKSSLFLLGSPVLADSFPDYINEKARNFSESLDRLLQINSHMAFTLIRYCLFVPKFTYVLRCCQLWKFPELLHSLDDTLKHTLSTILNIKFDERSWTQATLPVRFGGLGIRKTSDTALPAFLSSVHANRAVIAKILESSSFPFVIPFADEAKDAWDIASAGSEVPKNTSSQRLWDEPVCELVRNKLFNTSTSAVERARLLAVERWESGAWLQALPSKNTGTLLDRNTFRLATALRLGAPHVVPHQCVCGAHVGSYGHHGLCCSRSAGRFSRHHSLNDLIRRALVTAGVPAILEPSGLARDDGKRPDGMTLVPWSVGRALVWDATCVDTLASSHIQGTSSCAGAAANQAENLKRRKYENLSGDLIFEPFGVETLGAWGPGAHKLFRGISKKLVEATRDPRAGSYLAQRIAIAIQRGNAVSLLGTLPDGVDLGKFFFL

SEQ ID NO: 33250 - protein, 957 aa, Cyaniris semiargus
MLSTSQDAGTSTDDAIVPLEILVQCTHCPQPRYFRSERGLRIHIGKCHKESLLSSPSEASVSPSQSSTAREPFWQTISKLKQSVPVLRRIPRGARVAVAQKLAETIHKTVNENSRHAWENLLTFPYRTLHVIRDPQNNTSLTSRVKKNCATDIDLNQNFPLCSSAKNNIVKNVENKISEGDIKGAARLLFSSDTIAPNSPETVSALQKKHPHQLTSQNISDAHDAPPLQTTVDSVRGAIMSFPPGSAGGLDGITPQHLKDLTSGCCGDAGEKLLQEVTNLCNLMLRGEVASDIVDILYGANLCALRKRDGGIRPIAVGSTYRRLTAKIACRSIKSLSSYFQPKQLGFACKGGCEAAVHSFRTHIQNSKNSIYLKVDVRNAFNSIDRVAMLTQIKTKAPTILPFMLQCYREPTKLIYQNHLIQSEVGCQQGDPLGPAIFSLAIHPVIELLNSKFNVWYLDDGTLAGDASTVLSDFQTLIREFKIIGLDLNLGKCELFVPDDCEDRDEIISSVKAVAPELSVIEKSSLFLLGSPVLADSFPDYINEKARNFSESLDRLLQINSHMAFTLIRYCLFVPKFTYVLRCCQLWKFPELLHSLDDTLKHTLSTILNIKFDERSWTQATLPVRFGGLGIRKTSDTALPAFLSSVHANRAVIAKILESSSFPFVIPFADEAKDAWDIASAGSEVPKNTSSQRLWDEPVCELVRNKLFNTSTSAVERARLLAVERWESGAWLQALPSKNTGTLLDRNTFRLATALRLGAPHVVPHQCVCGAHVGSYGHHGLCCSRSAGRFSRHHSLNDLIRRALVTAGVPAILEPSGLARDDGKRPDGMTLVPWSVGRALVWDATCVDTLASSHIQGTSSCAGAAANQAENLKRRKYENLSGDLIFEPFGVETLGAWGPGAHKLFRGISKKLVEATRDPRAGSYLAQRIAIAIQRGNAVSLLGTLPDGVDLGKFFFL

SEQ ID NO: 33251 - protein, 965 aa, Celastrina argiolus
MSIDYQLTISSQDAGTSTDNTATVSLGNLLQCDHCPQTRFFKSQRGLNIHIGRCHKQFSATVPPTTHGDVVSNPTCQQVFWQQISKFKCFTPVLKRIPRGARVTVAQKLTETVRHTVHENSKQAWEKLLTFPYRILHVTRDPLNNASLTARVKKNCFLDSDTNPDFSIHSSTKYNVMKNVENKISEGDNKGAARLLFSNDTIAPDCPETFIALQNKHPSQLTPNHFTDIANTTSPLQTSTDKVRGAIMSFLPGSAGGLDGLTPQHLKDLTSGCCGEASEKLLHELTNLCNLMLRGEVASDIVDILYGANLCALKKRDGGIRPIAVGCTYRRLTAKLACKSVTSLASYFQPIQLGFACRGGCEAAVHSFRTAVQNQDDNVFLKVDVKNAFNSVDRATMLARIKSKAPAILPFMLQCYNDPTKLIYKNHLIQSEVGCQQGDPLGPAIFSLAIHPVIEQLNSKFNIWYLDDGTLGSDATTVLSDFNTLIREFKNIGLELNLGKCELFVPDSCGNRNDIISSFQKIAPQISVIDKDSLFLLGSPILNESLPVFVKNKLQNFSESLDRLLQINCHMAFTLIRYCLFVPKFTYVLRCCQLWKFPELLKQLDDTVRHTLSTILNINFNDRSWTQATLPVRFGGLGVRKPSNISLPAFLSSIHANRNLISQILQNTSLSNRVPFLDEAKDAWLASSACSELPVNTSSQKLWDEPLCRLTRNNLLNTSSSPADQARLLAAEKWESGLWLQVLPSPNTGTLLDKTTFRLATSLRLGIPHVVPHSCVCGAHVDSLGHHGLSCRRSAGRISRHHSLNDLIRRALATAGVPAVLEPAGLARDDGKRPDGMTLVPWRVGRALVWDATCVDTLAPSHVQGTSSVAGAAANQAENLKRRKYENLSGDLIFEPFGVETLGPWGPGAHKLFGQISKNLVEATRDPRAGTYLAQRVSIANQRGNSLSLLGTLPEGDDLGVIFYL

SEQ ID NO: 33252 - protein, 957 aa, Lysandra coridon
MLSNSQDAGTSSDDAILPLESLVHCSQCPQPRCFRSERGLRIHIGKCHKQTVLPSPSEASVPPSQNSAREPFWKTISNLKQSVPVLRRIPRGARVAVAQKLAESIRQTVNDNSRQAWEKLLTFPYRTLHVIRDPQNNASLTSRVKKNCTTEIDLTQHFSLGPSTKNNIVKNVENKISEGDIKGAARLLFSSDTIAPNSPETVLALQNKHPQQLTSQPFSDAHDVAPPFQTTVDSVREAIMSFPPGSAGGLDGITPQHLKDLTSGCCGDAGEKLLQEVTNLCNLMLRGEVASDIVDILYGANLCALRKRDGGIRPIAVGSTYRRLTAKIACRSMNSLSSYFQPKQLGFACKGGCEAAVHSFRTHIQNSKNTVYLKVDVKNAFNSVDRVAMLTQIKTKAPTILPFMLQCYQEPTKLIYRNHLIQSEVGCQQGDPLGPAIFSLAIHPVIELLNSKFNVWYLDDGTLASGPSTVLSDFQTLIREFKIIGLDLNLEKCELFVPDDCENRNEIISNFKAVAPELSVTEKSSLFLLGSPILADSFPDYINEKIQNFSESLDRLLQINSHMAFTLIRHCLFVPKFTYVLRCCQLWKFPQLLHSLDDTLKHTLSTILNIKFDERSWTQATLPVRFGGLGIRKTFDVALPAFLSSVHANRQVIAKILEPSSCPLDIPFADEAKDAWDIACAGSEVPVNTSSQRLWDGPVCELVRNKLLNTSTSVAERARLLAVERWESGGWLQALPSKNTGTLLDRNTFRLATALRLGAPHVVPHQCVCGTHVDSYGHHGLCCLRSAGRFSRHHSLNDLIRRALVTAGVPAILEPSGLVRDDGKRPDGMTLVPWNVGRALVWDATCVDTLAPSHVQGTSSCAGAAANQAENLKRRKYENLGGDFIFEPFGVETLGAWGPGAHKLFSEISKRLIEATRDPRAGSYLAQRIAIAIQRGNAVSLLGTLPDGDDLGKFFFL

SEQ ID NO: 33253 - protein, 950 aa, Glaucopsyche alexis
MLSSSQDVGTSTDDVTVPLENLVQCLQCPQPRYFKSERGLRIHIGKYHKQSLAPSPSVFLSSQISTEHQPFWQKISKLKNSVPILRRIPRGARVAVAQKLAETVHKTVSENSKQAWQHLFTFPYRILHVTRDPHNNASLTSLVKKNRVSDFDSNLNFSLPSSTKNNILKNVENKINEGDIKGAARLLFSNSPETLTALQNKHPPQLLPQLFPDTDNAEPALQTSVDSVRGAIMSFLPGSAGGLDGLTPQHLKDLTSGCCGEAGEKLLQEVTNLCNLMLRGGVASDVVDILYGANLCALRKRDGGIRPIAVGSTYRHLTAKIACRSINSLASYFQPKQLGFACKGGCEAAVHSFRTFIQNQNDSVFLKVDVKNAFNSVNRVAMLAQIKAKAPAILPFMLQCYKEPTKLIYKNNLVSSEVGCQQGDPLGPAIFSLAIHPAIELLNSKFNVWYLDDGTLGSDASTVLSDFRTLIHEFQNIGLELNFGKCELFVPDNCEDREAVISSFKEVAPQLSVIEKGSLLLLGSPILDDSLPEFINNKLQNFSENLDRLLQINCHMAFTLIRYCLFVPKFTYVLRCCQLWKFPQLLKRLDDTIKHTLSSILNINFDHRSWTQATLPVRFGGLGIRQTSDVALPAFLSSVHANHAVILKILERSSCPLVIPFADEAKDAWDIASAGSNVPENTFSQRLWDEPICRLIRNRLFNTSSSPAERARLLAVEKWESGVWLQALPSANTGTLLGRNTFRLATALRLGAPHVVPHQCVCGANVDSHGYHGLCCSRSAGRISRHHSLNDLIRRALVTAGVPAILEPSGLARDDGKRPDGMTLVPWSVGRALVWDATCVDTLAPSHIQGTSNCAGAAANQAENLKRRKYENLSGDLIFEPFGVETLGAWGPGAHKLFKEISKKLTEATRDPRAGNYLAQRIAIAIQRGNAISLLGTLPDGDDLGKFFYL

SEQ ID NO: 33254 - protein, 965 aa, Celastrina argiolus
MSIDYQLTISSQDAGTSTDNTATVSLGNLLQCDHCPQARFFKSQRGLNIHIGRCHKQFSATVPPTTHGDVVSNPTCQQVFWQQISKFKCFTPVLKRIPRGARVTVAQKLTETVRHTVHENSKQAWEKLLTFPYRILHVTRDPLNNASLTARVKKNCFLDSDTNPDFSIHSSTKYNVMKNVENKISEGDIKGAARLLFSNDTIAPDCPETFIALQNKHPSQLTPNHFTDIANTTSPLQTSTDKVRGAIMSFLPGSAGGLDGLTPQHLKDLTSGCCGEAGEKLLHELTNLCNLMLRGEVASDIVDILYGANLCALKKRDGSIRPIAVGCTYRRLTAKLACKSVTSLASYFQPIQLGFACRGGCEAAVHSFRTAVQNQDDNVFLKVDVKNAFNSVDRATMLARIKSKAPAILPFMLQCYNDPTKLIYKNHLIQSEVGCQQGDPLGPAIFSLAIHPVIEQLNSKFNIWYLDDGTLGSDATTVLSDFNTLIREFKNIGLELNLGKCELFVPDSCGNRNDIISSFQKIAPQISVIDKDSLFLLGSPILNESLPVFVKNKLQNFSESLDRVLQINCHMAFTLIRYCLFVPKFTYVLRCCQLWKFPELLNQLDDTVRHTLSTILNINFNDRSWTQATLPVRFGGLGVRKPSNISLPAFLSSIHANRNLISQILQNTSLSNRVPFLDEAKNAWLASSACSELPVNTSSQKLWDEPLCRLTRNNLLNTSSSPADQARLLAAEKWESGLWLQVLPSPNTGTLLDKTTFRLATSLRLGIPHVVPHSCVCSAHVDSLGHHGLSCRRSAGRISRHHSLNDLIRRALATAGVPAVLEPAGLARDDGKRPDGMTLVPWRVGRALVWDATCVDTLAPSHVQGTSSVAGAAANQAENLKRRKYENLSGDLIFEPFGVETLGPWGPGAHKLFGQISKNLVEATRDPRAGTYLAQRVSIAIQRGNSLSLLGTLPEGDDLGVIFYL

SEQ ID NO: 33255 - protein, 958 aa, Lysandra coridon
MLRNSQDAGTSTDDAILPLENLVQCSQCPQPRYFRSERGLRIHIGKCHKQPLLSSPSETSVPPSQNSTAREPFWQTLSKLKHSVPVLRRIPRGARVAVAQKLAETIHKTVNENSRQAWENLLTFSYHTLHVTRDPQNNASLTSRVKKNCVTEIELNQHFSLGSSTKNNIVKHVEDKISEGDIKGAARLLFSSDTIAPNSPETVLALQNKHPHQLSSQPFSDAHDVAPPLQTSVDSVRGAIMSFPPGSAGGLDGITPQHLKDLTSGCCGDAGEKLLQEVTNLCNLMLRGDVASDIVDILYGANLCALRKRDGGIRPIAVGSTYRRLTAKIACRSMNSLSSYFQPKQLGFACKGGCEAAVHSFRTHIQNSKNTAYLKVDVKNAFNSVDRVAMLTQIKTKAPTILPFMLQCYREPTKLIYQNHLIQSEVGCQQGDPLGPAIFSLAIHPVIELLNSKFNVWYLDDGTLASDASTVLSDFQTLIHEFKIIGLDLNLGKCELFVPDDCEDRDGIVSSFKAVAPELSVIEKSSLFLLGSPILADSFPDYIKEKVQNFSESLDRLLQINSHMAFTLIRYCLFVPKLTYVLRCCQLWKFPQLLHSLDDTLKHTLSTILNINFDERSWTQATLPVRFGGLGVRKISDIALPAFLSSFHANRAVIAKILEPSSCPLVIPFADEAKDAWNIASAGSRVPENTSSQRLWDGPVCELVRNKLFNTSTSVAERARLLAVERWESGAWLRALPSKNIGTLLDRNTFRLATALRLGAPHVVPHQCVCGAHVDSYGHHGLCCSRSAGHFTRHHNLNDLIRRALVTAGVPAILEPSGLARDDGKRPDGMTLVPWNMGRALVWDATCVDTLASSHVQGTSSCAGAAANQAENLKRRKYENLSGDLIFEPFGVETLGAWGPGAHKVFREISKRLIEATRDPRAGSYLAQRIAIAIQRGNAVSLLGTLPDGDDMGKFFFL

SEQ ID NO: 33256 - protein, 936 aa, Lysandra bellargus
MSPSEYTILRYFRSERGLRIHIGKCHKQPLLSSPSETSVPPSQNSTAREPFWQTLSKLKHSVPVLRRIPRGARVAVAQKLAETIHKTVNENSRQAWENLLTFSYHTLHVTRDPQNNASLTSRVKKNCVTEIELNQHFSLGSSTKNNIVKHVEDKISEGDIKGAARLLFSSDTIAPNSPETVLALQNKHPHQLSSQPFSDAHDVAPPLQTSVDSVRGAIMSFPPGSAGGLDGITPQHLKDLTSGCCGDAGEKLLQEVTNLCNLMLRGDVASDIIDILYGANLCALRKRDGGIRPIAVGSTYRRLTAKIACRSINSLSSYFQPKQLGFACKGGCEAAVHSFRTHIQNSKNTVYLKVDVKNAFNSVDRVAMLTQIKTKAPTILPFMLQCYREPTKLIYQNHLIQSEVGCQQGDPLGPAIFSLAIHPVIELLNSKFNVWYLDDGTLASDASTVLSDFQTLIHEFKIIGLDLNLGKCELFVPDDCEDRDGIVSSFKAVAPELSVIEKSSLFLLGSPILADSFPDYIKEKVQNFSESLDRLLQINSHMAFTLIRYCLFVPKLTYVLRCCQLWKFSQLLHSLDDTLKHTLSTILNINFDERSWTQATLPVRFGGLGVRKISDIALPAFLSSFHANRAVIAKILEPSSCPLVIPFADEAKDAWNIASAGSRVPENTSSQRLWDGPVCELVRNKLFNTSTSVAERARLLAVERWESGAWLRALPSKNIGTLLDRNTFRLATALRLGAPHVVPHQCVCGAHVDSYGHHGLCCSRSAGRFTRHHNLNDLIRRALVTAGVPAIREPSGLARDDGKRPDGMTLVPWNMGRALVWDATCVDTLASSHVQGTSSCAGAAANQAENLKRRKYENLSGDLIFEPFGVETLGAWGPGAHKVFREISKRLIEATRDPRAGSYLAQRIAIAIQRGNAVSLLGTLPDGDDMGKFFFL

SEQ ID NO: 33257 - protein, 941 aa, Bembecia ichneumoniformis
MYKMQCPQIRYFKSERGLRIHIGKCHKQRSVQTAILTPPHNSTPHQQPFWQEISTLKHSIPILKRIPKGARVAVAHNLAQAVHNTVRDNSRQAWEKLLSFPYRILHITRDPHNSASLTSRVKKNCNSNNDLNQSFSFSSSPKYNLFKSVENKISEGDIKGAARLLFSNDTIASNCSETLTALQNKHPRFQSSKFQLPPNFFQANDDVITLPLQTSAEKVRGAIISFPPGSAGGLDGLTPQHLKDLTSGCCGEAGETLLQELTSLCNLMLRGEVTSDIVDVLYGANLCALRKRDSGIRPIAVGSTYRRLTAKIACKSVNFLSSYFQPKQLGFACKGGCEAAVQSFRSAILNQDGDVFLKVDVKNAFNSVNRAAMLAQIKSKAPAILPFMIQCYNDPTKLLYKNHLISSEVGCQQGDPLGPAIFSLAIHPVIELLNSKFNAGYLDDGTLGSDASIVLSDFRTLILEFQNIGLDLNFAKCELFVTDNCVDRDAVISSFKEIAPQLSVIDKKSLHLLGSPILDESLPDFINSKLQNFSEILDRLLKINSHMAFSLIRYCLFVPKFTYVLRCCQLWKFPQLLSCLDNTIRHTLSSILNIRFDHRSWTQVTLPIRFGGLGKRKTSDVSLPAFLSSTHANHALIYQILGRSSCSVPVPYTDEAKDAWRIACANSDIPVNTSSQRLWDEPLCRLLQNNLINTSSSPAEHARLLAVEKWESGLWLKALPSPNTGTLLDPTTFRLATALHLGAPHVIPHRCICGTNVDSLGHHGLSCQRSAGRISRHHTLNDLIRRALVTAGVPAILEPSGLARDDGRRPDGMTLVPWKAGRPLVWDATCVDTLAPSHLQGTSNIAGAAANHAENFKRHKYENLTGDFVFVPFGVETLGTWGPGAHKLFREISKKLTETTRDPRAGNYLAQRISLTIQRGNALSLLGTLPDGDGLGLFFNL

SEQ ID NO: 33258 - protein, 963 aa, Bembecia ichneumoniformis
MLSRSQDAGTSTDNATVSSENLVQCLQCPQIRYFKSERGLRIHIGKCHKQRSVQTAILTPPHNSTPHQQPFWQEISTLKHSIPILKRIPKGARVAVAHNLAQAVHNTVRDNSRQAWEKLLSFPYRILHITRDPHNSASLTSRVKKNCNSNNDLNQYFSFSSSPKYNLFKSVENKISEGDIKGAARLLFSNDTIASNCSETLTALQNKHPRFQSSKFQLPPNFFQANDDVITPPLQTSAEKVRGAIISFPPGSAGGLDGLTPQHLKDLTSGCCGEAGETLLQELTSLCNLMLRGEVTSDIVDVLYGANLCALRKRDGGIRPIAVGSTYRRLTAKIACKSVNFLSSYFQPKQLGFACKGGCEAAVHSFRSAILNQGGDVFLKVDVKNAFNSVNRVAMLAQIKSKAPAILPFMIQCYNDPTKLLYKNHLISSEVGCQQGDPLGPAIFSLAIHPVIELLNSKFNVWYLDDGTLGGDASIVLSDFRTLILEFQKIGLDLNFAKCELFVTDNCVDRDAVISSFKEIAPQLSVIDKKSLHLLGSPILDESLPDFINSKLQNFSEILDRLLKINSHMAFSLIRYCLFVPKFTYVLRCCQLWKFPQLLSCLDNTIRHTLSSILNIRFDHRSWTQATLPIRFGGLGIRKTSDVSLPAFLSSTHANHALIYQILGRSSCSVPVPYTDEAKDAWRIACANSDIPVNTSSQRLWDEPLCRLLQNNLINTSSSPAEHARLLAVEKWESGLWLKALPSPNTGTLLDPTTFRLATALHLGAPHVIPHRCVCGTNVDSLGHHGLSCQRSAGRISRHHTLNDLIRRALVTAGVPAILEPSGLARDDGRRPDGMTLVPWKAGRPLVWDATCVDTLAPSHLQGTSNIAGAAANHAENLKRHKYENLSGDFIFVPFGVETLGTWGPGAHKLFREISKKLTETTRDPRAGNYLAQRISLTIQRGNALSLLGTLPDGDGLGLFFNL

SEQ ID NO: 33259 - protein, 959 aa, Glaucopsyche alexis
MLSSSQDVGTSTDTVTVPLENLVQCLQCPQPRYFKSERGLRIHIGKCHKQSLAPSPSVVLSSQISIEHQPFWQEISKLKNSVPILRRIPRGARVAVAQKLAETVHKTVSENSRQAWENLFTFPYRILHVTRDPHNNVSLTSLVKKNCYSDFDLNLNFSLTKSTKNNILKNVENKISEGDIKGAARLLFSNDTIAPNSPETLTALQNKHPPQQSPQLFPDTDDVEPALQTSVDSVRGAIMSFLPGSAGGLDGLTPQHLKDLTSGCCGEAGEKLLQEVTNLCNLMLRGGVASDVVDILYGANLCALRKRDGGIRPIAVGSTYRRLTAKIACRSINSLASYFQPKQLGFACKGGCEAAVHSFRTFIKNQNDSVFLKVDVKNAFNSVNRVAMLAQVKAKAPAILPFMLQCYKEPTKLIYKNHLISSEVGCQQGDPLGPAIFSLAIHPAIELLNSKFNVWYLDDGTLGSDASTVLSDFRTLIHEFQNIGLELNFGKCELFVPDNCEDREAVISSFKEVAPQLSVIEKGSLLLLGSPILDDSVPEFINNKLQNFSETLDRLLQINCHMAFTLIRYCLFVPKFTYVLRCCQLWKFPQLLKRLDDTIKHTLSSILNINFDHRSWTQATLPVRFGGLGIRQTSDVALPAFLSSVHANHAVILKILERSSCPLAIPFADEAKNAWDIASAGSNVPENTFSQRLWDEPICRLVRNRLFNTSSSPAERARLLAVEKWESGVWLQALPSANTGTLLGRNTFQLATALRLGAPHVVPHQCVCGANVDSHGYHGLCCSRSAGRISRHHSLNDLIRRALVTAGVPAILEPSGLARDDGKRPDGMTLVPWSVGRALVWDATCVDTLAPSHIQGTSNCAGAAANQAENLKRRKYENLSGDLIFEPFGVETLGAWGPGAHKLFKEISKKLTEATRDPRAGNYLAQRIAIAIQRGNAISLLGTLPDGDDLGKIFYLYFF

SEQ ID NO: 33260 - protein, 672 aa, Glaucopsyche alexis
MSFLPGSAGGLDGLTPQHLKNLTSGCCGEAGEKLLNELTNLCNLMLRGGVASDIVDILYGANLCALKKRDGGIRPIAVGSTYRRLTAKLACKSITSLASYFQPKQLGFACKGGCEAAVHSFRTAIHNQGDDVFLKVDVKNAFNSVERGAMLAQIKSKAPAILPFILQCYNDPTKLIYKDHLISSEVGCQQGDPLGPAIFSLAIHPVIELLNSKFNVWYLDDGTIGSDAPTVLSDFQTLIREFQKIGLELNLGKCELFVPDSCEDRNAIISSFKEIAPQLSVIDKDSLFLLGSPILDESLPEFINNKLQNFSETLDRLLQINCHMAFTLIRYCVFVPKFTYVLRCCQLWKFPQLLKQLDDTIRHTLSTILNINFDDRSWTQATLPVRFGGLGVRKPSDISLPAYLSSVHANHRLIFKILEHQSYSIIVPFLDEAKDVWSATSACSELPDNVFSQRLWDEPLCRLVRNNLLNTSSSPVEQARLLAAEKWESGLWLQALPSPNTGTLLDRTAFRIATSLRLGTSHVVPHRCVCGANVDSLGHHGLSCQRSAGRISRHHCLNDLIRRALVTAGVPAVLEPSGLARDDGKRPDGMTLVPWRVGRALVWDATCVDTLAPSHVQGTSSTAGAAAIQAENFKRRKYENLSGDLIFEPFGVETLGSWGPGAHKLFREISKI

SEQ ID NO: 33261 - protein, 958 aa, Aricia agestis
MLSNSQDAGTSTDDAIVPLEILVQCTQCPQPRYFRSERGLRIHRGKCHKEPLLSSPSDASVSPSQNSTAREPFWQTISKLKQSVPVLRRIPRGARVAVAQKLAETIHKTVNENSRQAWENLLTFPYRTLHVTRDPQNNTSLTSRVKKNCASDIVLNQNFPLCSSGKNNIVKNVENKISEGDIKGAARLLFSSDTIAPNSPETVSALQKKHPHQLTSQHISDAHDGTPPLQTSVDSVRGAIMSFPPGSAGGLDGITSQHLKDLTSGCCGDAGEKLLQEVTNLCNLMLRGEVASDIVDILYGANLCALRKRDGGIRPIAVGSTYRRLTAKIACRSIKSLSSYFQPKQLGFACKGGCEAAVHSFRTHVQNSKNSIYLKVDVSNAFNSVDRVAMLTQIKTKAPTILPFMLQCYRDPTKLVYQNHLIQSEVGCQQGDPLGPAIFSLAIHPVIELLNSKFNVWYLDDGTLASDASTVLSDFQTLIREFKIIGLDLNLGKCELFVPDDCGDRDEIISSFKAVAPELSVIEKSALFLLGSPVLADSFPDYINEKTRNFSESLDRLLQINSHMAFTLIRYCLFVPKFTYALRCCQLWKFPELLHSLDDTLKHTLSTILNIKFDERSWTQATLPVRFGGLGIRKTSDTALPAFLSSVHANRAVIAKILEPSSCPFVIPFADEAKDAWDIASAGSEVPKNTSSQRLWDEPICELVRNKLFNTSTSAVERARLLAVERWESGAWLQALPSKNTGTLLDRNTFRLATALRLGVPHVVPHQCVCGARVDSYGHHGLCCSRSAGRFSRHHNLNDLIRRALVTAGVPAILEPSGLARDDGKRPDGMTLVPWNVGRALVWDATCVDTLASSHIQSTSSCAGAAANQAENLKRRKYENLSGDLIFEPFGVETLGAWGPGAHKLFRGISKKLVEATRDPRAGSYLAQRIAIAIQRGNAVSLLGTLPDGDDLGKFFFL

SEQ ID NO: 33262 - protein, 951 aa, Glaucopsyche alexis
MTRSQDAGTYTDITTVSLGNLQQCSHCSRYFKSQRGLNIHVGKCHKQLPTLIPLITTSLPNPIYQTSFWQKISKFKRFVPVLKRIPRGARVTVAQKLAETIRHTVLENSRQAWENLLTFPYRFLHVTRDPLNNASLTSRIKKNCVSDIDLNPNFSLHSSAKFNLVKSVENKISEGDIKGAARLLFSNDTVAPDCPETLIALQNKHPSQSNPFTASDDALPPLQTSADKVRGAIMSFLPGSAGGLDGLTPQHLKDLTSGCCGEAGEKLLNELTNLCNLMLRGGVASDIVDILYGANLCALKKRDGGIRPIAVGSTYRRLTAKLACKSITSLASYFQPKQLGFACKGGCEAAVHSFRTAIHNQGDDVFLKVDVKNAFNSVERGAMLAQIKSKAPAILPFILQCYNDPTKLIYKDHLISSEVGCQQGDPLGPAIFSLAIHPVIELLNSKFNVWYLDDGTIGSDAPTVLSDFQTLIREFQKIGLELNLGKCELFVPDSCEDRNAIISSFKEIAPQLSVIDKDSLFLLGSPILDESLPEFINNKLQNFSETLDRLLQINCHMAFTLIRYCVFVPKFTYVLRCCQLWKFSQLLKQLDDTIRHTLSTILNISFDDRSWTLATLPVRFGGLGVRKPSDISLPAYLSSVHANHRLIFKILEHQSYSIIVPFLDEAKDVWSATSACSELPDNVFSQRLWDEPLCRLVRNNLLNTSSSPVEQARLLAAEKWESGLWLQALPSPNTGTLLDRTAFRIATSLRLGTSHVVPHRCVCGANVDSLGHHGLSCQRSAGRISRHHCLNDLIRRALVTAGVPAVLEPSGLARDDGKRPDGMTLVPWRVGRALVWDATCVDTLAPSHVQGTSSTEGAAANQAENFKRRKYENLSGDLIFEPFGVETLGSWGPGAHKLFREISKKLIKATRDPRAGTYLAQRVIIAIQRGNSLSLLGTLPGGDDLGDFFLL

SEQ ID NO: 33263 - protein, 957 aa, Cyaniris semiargus
MLSTSQDAGTSTDDAIVPLEILVQCTQCPQPRYFRSERGLRIHIGKCHKESLLSSPSEASVSPSQSSTAREPFWQTISKLKQSVPVLRRIPRGARVAVAQKLAETIRKTVNENSRHAWENLLTFPYHTLHVIRDPQNNTSLTSRVKKNCATDIDLNQNFPLCSSAKNNIVKNVENKISEGDIKGAARLLFSSDTIAPNSPETVSALQKKHPHQMTSQNISDAHDAPPLQTTVDSVRGAIMSFPPGSAGGLDGITPQHLKDLTSGCCGDAGEKLLQEVTNLCNLMLRGEVASDIVDILYGANLCALRKRDGGIRPIAVGSTYRRLTAKIACRSIKSLSSYFQPKQLGFACKGGCEAAVHSFRTHIQNSKNSIYLKVDVRNAFNSIDRVAMLTQIKTKAPTILPFMLQCYREPTKLIYQNHLIQSEVGCQQGDPLGPAIFSLAIHPVIELLNSKFNVWYLDDGTLAGDASTVLSDFQTLIREFKIIGLDLNLGKCELFVPDDCEDRDEIISSVKAVAPELSVIEKSSLFLLGSPVLADSFPDYINEKARNFSESLDRLLQINSHMAFTLIRYCLFVPKFTYVLRCCQLWKFPELLHSLDDTLKHTLSTILNIKFDERSWAQATLPVRFGGLGIRKTSDTALPAFLSSVHANRAVIAKILESSSLPFVIPFADEAKDAWDIASAGSEVPKNTSSQRLWDEPVCELVRNKLFNTSTSAVERARLLAVERWESGAWLQALPSKNTGTLLDRNTFRLATALRLGAPHVVPHQCVCGAHVGSYGHHGLCCSRSAGRFSRHHSLNDLIRRALVTAGVPAILEPSGLARDDGKRPDGMTLVPWSVGRALVWDATCVDTLASSHIQGTSSCAGAAANQAENLKRRKYENLSGDLIFEPFGVETLGAWGPGAHKLFRGISKKLVEATRDPRAGSYLAQRIAIAIQRGNAVSLLGTLPDGDDLGKFFFL

SEQ ID NO: 33264 - protein, 958 aa, Aricia agestis
MLSNSQDAGTSTDDAIVPLEILVQCTQCPQPRYFRSERGLRIHRGKCHKEPLLSSPSDASVSPSQNSTAREPFWQTISKLKQSVPVLRRIPRGARVAVAQKLAETIHKTVNENSRQAWENLLTFPYRTLHVTRDPQNNTSLTSRVKKNCASDIVLNQNFPLCSSGKNNIVKNDENKISEGDIKGAARLLFSSDTIAPNSPETVSALQKKHPHQLTSQHISDAHDGTPPLQTTVDSVRGAIMSFPPGSAGGLDGITSQHLKDLTSGCCGDAGEKLLQEVTNLCNLMLRGEVASDIVDILYGANLCALRKRDGGIRPIAVGSTYRRLTAKIACRSIKSLSSYFQPKQLGFACKGGCEAAVHSFRTHVQNSKNSIYLKVDVSNAFNSVDRVAMLTQIKTKAPTILPFMLQCYRDPTKLIYQNHLIQSEVGCQQGDPLGPAIFSLAIHPVIELLNSKFNVWYLDDGTLASDASTVLSDFQTLIREFKIIGLDLNLGKCELFVPDDCGDRDEIISSFKAVAPELSVIEKSSLFLLGSPVLADSFPDYINEKTRNFSESLDRLLQINSHMAFTLIRYCLFVPKFTYALRCCQLWKFPELLHSLDDTLKHTLSTILNIKFDERSWTQATLPVRFGGLGIRKTSDTALPAFLSSVHANRAVIAKILEPSSCPFVIPFADEAKDAWDIASAGSEVPKNTSSQRLWDEPICELVRNKLFNTSTSAVERARLLAVERWESGAWLQALPSKNTGTLLDRNTFRLATALRLGVPHVVPHQCVCGARADSYGHHGLSCSRSAGRFSRHHNLNDLIRRALVTAGVPAILEPSGLVRDDGKRPDGMTLVPWSVGRALVWDATCVDTLASSHIQSTSSCAGAAANQAENLKRRKYENLSGDLIFEPFGVETLGAWGPGAHKLFRGISKKLVEATRDPRAGSYLAQRIAIAIQRGNAVSLLGTLPDGDDLGKFFFL

SEQ ID NO: 33265 - protein, 963 aa, Bembecia ichneumoniformis
MLSRSQDAGTSTDNATVSSENLVQCLQCPQIRYFKSERGLRIHIGKCHKQRSVQTAILTPPHNSTPHQQPFWQEISTLKHSIPILKRIPKGARVAVAHNLAQAVHNTVRDNSRQAWEKLLSFPYRILHITRDPHNSASLTSRVKKNCNSNNDLNQSFSFSSLPKYNLFKSVENKISEGDIKGAARLLFSNDTIASNCSETLTALQNKHPRFQSSKFQLPPNFFQANDDVITPPLQTSAEKVRGAIISFPPGSAGGLDGLTPQHLKDLTSGCCGESGETLLQELTSLCNLMLRGEVTSDIVDVLYGANLCALRKRDGGIRPIAVGSTYRRLTAKIACKSVNFLSSYFQPKQLGFACKGGCEAAVHSFRSAILNQGGDVFLKVDVKNAFNSVNRVAMLAQIKSKAPAILPFMIQCYNDPTKLLYKNHLISSEVGCQQGDPLGPAIFSLAIHPVIELLNSKFNVWYLDDGTLGSDASTVLSDFRTLILEFQNIGLDLNFAKCELFVTDNCVDRDAVISSFKEIAPQLSVIDKKSLHLLGSPILDESLPDFINSKLQNFSEILDRLLKINSHMAFSLIRYCLFVPKFTYVLRCCQLWKFPQLLSCLDNTIRHTLSSILNIRFDHRSWTQATLPIRFGGLGIRKTSDVSLPAFLSSTHANHALIYQILGRSSCSVPVPYTDEAKDAWRIACANSDIPVNTSSQRLWDEPLCRLLQNNLINTSSSPAEHARLLAVEKWESGLWLKALPSPNTGTLLDPTTFRLATALHLGAPHVIPHRCVCGTNVDSLGHHGLSCQRSAGRISRHHTLNDLIRRALVTAGVPAILEPSGLARDDGRRPDGMTLVPWKAGRPLVWDATCVDTLAPSHLQSTSNIAGAAANHAENLKRHKYENLSGDFIFVPFGVETLGTWGPGAHKLFREISKKLTETTRDPRAGNYLAQRISLTIQRGNALSLLGTLPDGDGLGLFFNL

SEQ ID NO: 33266 - protein, 958 aa, Lysandra coridon
MLRNSQDAGTSTDDAILPLENLVQCCQCPQPRYFRSERGLRIHIGKCHKQPLLSSPSETSVPPSQNSTAREPFWQTLSKLKHSVPVLRRIPRGARVAVAQKLAETIHQTVNENSRQAWENLLTFSYHTLHVTRDPQNNASLTSRVKKNCVTEIELNQHFSLGSSTKNNIVKHVEDKISEGDIKGAARLLFSSDTIAPNSPETVLALQNKHPHQLSSQPFSDAHDVAPPLQTSVDSVRGAIMSFPPGSAGGLDGITPQHLKDLTSGCCGDAGEKLLQEVTNLCNLMLRGDVASDIVDILYGANLCALRKRDGGIRPIAVGSTYRRLTAKIACRSINSLSSYFQPKQLGFACKGGCEAAVHSFRTHIQNSKNTVYLKVDVKNAFNSVDRVAMLTQIKTKAPTILPFMLQCYREPTKLIYQNHLIQSEVGCQQGDPLGPAIFSLAIHPVIELLNSKFNVWYLDDGTLASDASTVLSDFQTLIHEFKIIGLDLNLGKCELFVPDDCEDRDGIVSSFKAVAPELSVIEKSSLFLLGSPILADSFPDYIKEKVQNFSESLDRLLQINSHMAFTLIRYCLFVPKLTYVLRCCQLWKFPQLLHSLDDTLKHTLSTILNINFDERSWTQATLPVRFGGLGVRKISDIALPAFLSSFHANRAVIAKILEPSSCPLVIPFADEAKDAWNIASAGSRVPENTSSQRLWDGPVCELVRNKLFNTSTSVAERARLLAVERWESGAWLRALPSKNIGTLLDRNTFRLATALRLGAPHVVPHQCVCGAHVDSYGHHGLCCSRSAGRFTRHHNLNDLIRRALVTAGVPAILEPSGLARDDGKRPDGMTLVPWNMGRALVWDATCVDTLASSHVQGTSSCAGAAANQAENLKRRKYENLSGDLIFEPFGVETLGAWGPGAHKLFREISKRLTEATRDPRAGSYLAQRIAIAIQRGNAVSLLGTLPDGDDMGKFFFL

SEQ ID NO: 33267 - protein, 958 aa, Aricia agestis
MLSNSQDAGTSTDDAIVPLEILVQCTQCPQPRYFRSERGLRIHRGKCHKEPLLSSPSDASVSPSQNSTAREPFWQTISKLKQSVPVLRRIPRGARVAVAQKLAETIHKTVNENSRQAWENLLTFPYRTLHVTRDPQDNTSLTSRVKKNCASDIVLNQNFPLCSSGKNNIVKNVENKISEGDIKGAARLLFSSDTIAPNSPETVSALQKKHPHQLTSQHISDAHDGTPPLQTTVDSVRGAIMSFPPGSAGGLDGITSQHLKDLTSGCCGDAGEKLLQEVTNLCNLMLRGEVASDIVDILYGANLCALRKRDGGIRPIAVGSTYQRLTAKIACRSIKSLSSYFQPKQLGFACKGGCEAAVHSFRTHVQNSKNSIYLKVDVSNAFNSVDRVAMLTQIKTKAPTILPFMLQCYRDPTKLIYQNHLIQSEVGCQQGDPLGPAIFSLAIHPVIELLNSKFNVWYLDDGTLASDASTVLSDFQTLIREFKIIGLDLNLGKCELFVPDDCGDRDEIISSFKAVAPELSVIEKSALFLLGSPVLADSFPDYINEKTRNFSESLDRLLQINSHMAFTLIRYCLFVPKFTYALRCCQLWKFPELLHSLDDTLKHTLSTILNIKFDERSWTQTTLPVRFGGLGIRKTSDTALPAFLSSVHANRAVIAKILEPSSCPFVIPFADEAKDAWDIASAGSEVPKNTSSQRLWDEPVCELVRNKLFNTSTSAVERARLLAVERWESGAWLQALPSKNTGTLLDRNTFRLATALRLGVPHVVPHQCVCGARVDSYGHHGLCCSRSAGRFSRHHNLNDLIRRALVTAGVPAILEPSGLARDDGKRPDGMTLVPWNVGRALVWDATCVDTLASSHIQCTSSCAGAAANQAENLKRRKYENLSEDLKFEPFGVETLGAWGPGAHKLFRGISKKLVEATRDPRAGSYLAQRIAIAIQRGNAVSLLGTLPDGDDLGKFFFL

SEQ ID NO: 33268 - protein, 929 aa, Celastrina argiolus
MLSSQDAGTETNISTVSLGNLVQCSFCPQARYFKSQRGLNIHVGKCHKQLSSVTPPLPNAAYPTDFWHELSKFKCSLPVVKRIPRGARVPVAQKLAETVRKTVLENSRQAWEKLLTFPYRILHVNRDPLNNASLTSRIKKNCSSDTDLNIHFSSYSSTPKYNVVKTVENKLSMGDVKGAARLLFSSDTVAPDCPETLVALQNKHPTQISPNPPASADDTIPPLQTSADKVRGAIMSFLPGSAGGLDGLTSQHLKDLTSCCCGETGEKLLHELTNLCNLMLRGEVVTDIVDILYGANLCALKKRDGGIRPIAVGSTYRRLTAKLACKSLTFLASYFQPKQLGFACKGGCEAAVHSFRTAIHNQSGDVFLKVDVKNAFNSVDRVAMLAQIKLKAPAILPFMLQCYNDPTKLIYQNHLISSEVGCQQGDPLGPAIFSLAIQPVVELLNSKFNVWYLDDGTLGSDAHTVLSDFQNLIHELKKIGLELNLGKCELFVPDNCQDRDAIISRFKDVAPQLSIIDKGSLLLLGSPILDESLPDFIDNKLQNFCDTLDRLLQINCHMAFTIVRYCLFVPKFTYVLRCCQLWKFPELLKRLDDTLKHTLSSILNISFDHRSWTQATLPVRFGGLGIRKASDIALPAFLSSVHFNHTVISKILERSNYPLTIPFADEAKNAWDIVSAGSIVPENTSSQRLWDEPICRLVRNCLFNTSSSPAERARLLAVERWESGVWLQALPSANIGTLLDRSTFQLATALRLGAPHVVPHQCVCGANVDSYGHHGLCCTRSAGRISRHHSLNDLIRRALVTAGVPAILEPSGLARDDGKRPDGMTLVPWSVGRALVWDATCVDTLAPSHVQATSSCAGAAAYQAENLKRRKYETLGGDIIFEPFGVETLGSWGPGYLAQRIAIAIQRGNAVSLLGTLPEGDDLAAFFYL

SEQ ID NO: 33269 - protein, 951 aa, Glaucopsyche alexis
MTRSQDAGSSTDITTVSLGNLQQCSHCSRYFKSQRGLNIHVGKCHKQLPTLIPPITTSLPNPIYQNSFWQKISKFKRFVPVLKRIPRGARVTVAQKLAETIRHTVLENSRQAWENLLTFPYRFLHVTRDPLNNASLTSRIKKNCVSDIDLNPNFSLHSSAKFNLVKSVENKISEGDIKGAARLLFSNDTVAPDCPETLIALQNKHPSQSNPFTASDDAFPPLQTSADKVRGAIMSFLPGSAGGLDGLTPQHLKDLTSGCCGEAGEKLLNELTNLCNLMLRGGVASDIVDILYGANLCALKKRDGGIRPIAVGSTYRRLTAKLACKSVTSLASYFQPKQLGFACKGGCEAAVHSFRTAIHNQGDDVFLKVDVKNAFNSVERGAMLAQIKSKAPAILPFILQCYNDPTKLIYKDHLISSEVGCQQGDPLGPAIFSLAIHPVIELLNSKFNVWYLDDGTIGSDAPTVLSDFQTLIREFQKIGLELNLGKCELFVPDSCEDRNAIISSFKEIAPQLSVIDKDSLFLLGSPILDESLPEFINNKLQNFSETLDRLLQINCHMAFTLIRYCVFVPKFTYVLRCCQLWKFPQLLKQLDDTIRHTLSTILNINFDDRSWTQATLPVRFGGLGVRKPSDISLPAYLSSVHANHRLIFKILEHQSYSIIVPFLDEAKDVWSATSACSELPDNVFSQRLWDEPLCRLVRNNLLNTSSSPVEQARLLAAEKWESGLWLQALPSPNTGTLLDRTAFRIATSLRLGTPHVVPHRCVCGANVDSLGHHGLSCQRSAGRISRHHCLNDLIRRALVTAGVPAVLEPSGLARDDGKRPDGMTLVPWRVGRALVWDATCVDTLSPSHVQGTSSTAGAAANQAENFKRRKYENLSGDLIFEPFGVETLGSWGPGAHKLFREISKKLIEATRDPRAGTYLAQRVSIAIQRGNSLSLLGTLPGGDDLGDFFLL

SEQ ID NO: 33270 - protein, 974 aa, Celastrina argiolus
MITNMITNMITIDYQLTISSQDAGTSTDNTATVSLGNLLQCDHCPQARFFKSQRGLNIHIGRCHKQFSATVPPTTHGDVVSNPTCQQVFWQQISKFKCFTPVLKRIPRGARVTVAQKLTETVRHTVHENSKQAWEKLLTFPYRILHVTRDPLNNASLTARVKKNCFLDSDTNPDFSIHSSTKYNVMKNVENKISEGDIKGAARLLFSNDTIAPDCPETFIALQNKHPSQLTPNHFTDIANTTSPLQTSTDKVRGAIMSFLPGSAGGLDGLTPQHLKDLTSGCCGEAGEKLLHELTNLCNLMLRGEVASDIVDILYGANLCALKKRDGGIRPIAVGCTYRRLTAKLACKLVTSLASYFQPIQLGFACRGGCEAAVHSFRTAVQNQDDNVFLKVDVKNAFNSVDRATMLARIKSKAPAILPFMLQCYNDPTKLIYKNHLIQSEVGCQQGDPLGPAIFSLAIHPVIEQLNSKFNIWYLDDGTLGSDATTVLSDFNTLIREFKNIGLELNLGKCELFVPDSCGNRNDIISSFQKIAPQISVIDKDSLFLLGSPILNESLPVFVKKKLQNFSESLDRLLQINCHMAFTLIRYCLFVPKFTYVLRCCQLWKFPELLKQLDDTVRHTLSTILNINFNDRSWTQATLPVRFGGLGVRKPSNISLPAFLSSIHANRNLISQILQNTSLSNRVPFLDEAKDAWLASSACSELPVNTSSQKLWDEPLCRLTRNNLLNTSSSPADQARLLAAEKWESGLWLQVLPSPNTGTLLDKTTFRLATSLRLGIPHVVPHSCVCGAHVDSLGHHGLSCRRSAGRISRHHSLNDLIRRALATAGVPAVLEPAGLARDDGKRPDGMTLVPWRVGRALVWDATCVDTLAPSHVQGTSSVTGAAANQAENLKRRKYENLSGDLIFEPFGVETLGPWGPGAHKLFGQISKNLVEATRDPRAGTYLAQRVSIAIQRGNSLSLLGTLPEGDDLGVIFYL

SEQ ID NO: 33271 - protein, 963 aa, Bembecia ichneumoniformis
MLSRSQDAGTSTDNATVSSENLVQCLQCPQIRYFKSERGLRIHIGKCHKQRSVQTAILTPPHNSTPHQQPFWQEISTLKHSIPILKRIPKGARVAVAHNLAQAVHNTVRDNSRQAWEKLLSFPYRILHITRDPHNSASLTSRVKKNCNSNNDLNQYFSFSSSPKYNLFKSVENKISKGDIKGAARLLFSNDTIASNCSETLTALQNKHPRFQSSKFQLPPNFFQANDDVITPPLQTSAEKVRGAIISFPPGSAGGLDGLTPQHLKDLTSGCCGEAGETLLQELTSLCNLMLRGEVTSDIVDVLYGANLCALRKRDGGIRPIAVGSTYRRLTAKIACKSVNFLSSYFQPKQLGFACKGGCEAAVHSFRSAILNQGGDVFLKVDVKNAFNSVNRVAMLAQIKSKAPAILPFMIQCYNDPTKLLYKNHLISSEVGCQQGDPLGPAIFSLAIHPVIELLNSKFNVWYLDDGTLGGDASIVLSDFRTLILEFQKIGLDLNFAKCELFVTDNCVDRDAVISSFKEIAPQLSVIDKKSLHLLGSPILDESLPDFINSKLQNFSEILDRLLKINSHMAFSLIRYCLFVPKFTYVLRCCQLWKFPQLLSCLDNTIRHTLSSILNIRFDHRSWTQATLPIRFGGLGIRKTSDVSLPAFLSSTHANHALIYQILGRSSCSVPVPYTDEAKDAWRIACANSDIPVNTSSQRLWDEPLCRLLQNNLINTSSSPAEHARLLAVEKWESGLWLKALPSPNTGTLLDPTTFRLATALHLGAPHVIPHRCVCGTNVDSLGHHGLSCQRSAGRISRHHTLNDLIRRALVTAGVPAILEPSGLARDDGRRPDGMTLVPWKAGRPLVWDAPCVDTLAPSHLQGTSNIAGAAANHAENLKRHKYENLSGDFIFVPFGVETLGTWGPGAHKLFREISKKLTETTRDPRAGNYLAQRISLTIQRGNALSLLGTLPDGDGLGLFFNL

SEQ ID NO: 33272 - protein, 957 aa, Glaucopsyche alexis
MLSSSQDVGTSTDDVTVPLENLVQCLQCPQPRYFKSERGLRIHIGKCHKQSLAPSPSVILPSQNSNEHQPFWQEISKLKNSVPILRRIPRGARVAVAQKLAETVHKTVNENSRQAWEHLFTFPYRILHVTRDPHNNASLMSLIKKNCVSDFDFKSNFSLLSSVKNNSLKNVENKISEGDIKGAARLLFSNDTIAPNSPETLTALQNKHPPQLFPPHVFLDTDDVEPALQTSVDSVRGAIMSFLPGSAGGLDGLTPQHLKDLTGGCCGEAGEKLLQEVTNLCNLMLRGEVASDVVDILYGAKLCALRKRDGGIRPIAVGSTYRRLTAKIACRSINSLASYLQPKQLGFACKGGCEAAVHSFRTFIKNQNESVFLKVDVKNAFNSVNRVAMLAEIKAKAPAILPFMLQCYKEPTKLIYKNHLISSEVGCQQGDPLGPAIFSLAIHPAIELLNSKFNVWYLDDGTLGSDASTVLSDFRTLIHEFQNIGLELNFGKCELFVPDTCQDREAVISRFKEVAPQISVIEKSSLLLLGSPILDDSLPDFINSKLQDFSETLNRLLQINCHMAFTLIRYCLFVPKFTYVLRCCQLWKFPQLLKRLDDTIKHTLSSILNINFDYRSWTQATLPVRFGGLGIRQTSDVALPAFLSSVHANHAVISKILERSSCPLNIPFANEAKDAWGIASAGSNVPENTFSQRLWDEPICRLVRNRLFNTSSSPAERARLLAVEKWESGVWLQALPSANTGTLLGRNTFRLATALRLGAPHVVPHQCVCGANVDSHGHHGLCCSRSAGRISRHHSLNDLIRRALVTAGVPAILEPSGLVRNDGKRPDGMTLVPWSVGRALVWDATCVDTLAPSHVQGTSNCAGAAANQAENLKRRKYENLSGDLIFEPFGVETLGAWGPGAHKLFKEISKKLAEATRDPRAGNYLAQRIAIAIQRGNAISLLGTLPDGDDLGKFFYL

SEQ ID NO: 33273 - protein, 952 aa, Celastrina argiolus
MLSSQDAGTETDISTVSLGNLVQCSFCPQARYFKSQRGLNIHVGKCHKQLSSVTPPLPNAAYPTDFWHELSKFKCSLPVVKRIPRGARVPVAQKLAETVRKTVLENSRQAWEKLLTFPYRILHVNRDPLNNASLTSRIKKNCFSDTDLNIHFSSYSSTPKYNVVKTVENKLSMGDVKGAARLLFSSDTVAPNCPETLVALQNKHPTQISPNPPASADDTIPPLQTSADKVRGAIMSFLPGSAGGLDGLTSQHLKDLTSCCCGETGEKLLHELTNLCNLMLRGEVVTDIVDILYGANLCALKKRDGGIRPIAVGSTYRRLTAKLACKSLTFLASYFQPKQLGFACKGGCEAAVHSFRTAIHNQSGDVFLKVDVKNAFNSVDRVAMLAQIKLKAPAILPFMLQCYNDPTKLIYQNHLISSEVGCQQGDPLGPAIFSLAIQPVVELLNSKFNVWYLDDGTLGSDAHTVLSDFQNLIHELKKIGLELNLGKCELFVPDNCQDRDAIISRFKDVAPQLSIIDKGSLLLLGSPILDESLPDFIDNKLQNFCDTLDRLLQINCHMAFTIVRYCLFVPKFTYVLRCCQLWKFPELLKRLDDTLKHTLSSILNISFDHRSWTQATLPVRFGGLGIRKASDIALPAFLSSVHFNHTVISKILERSNYPLTIPFADEAKNAWDIVSAGSIVPENTSSQRLWDEPICRLVRNCLFNTSSSPAERARLLAVERWESGVWLQALPSANIGTLLDRSTFQLATALRLGAPHVVPHQCVCGANVDSYGHHGLCCTRSAGRISRHHSLNDLIRRALVTAGVPAILEPSGLARDDGKRPDGMTLVPWSVGRALVWDATCVDTLAPSHVQATSSCAGAAAYQAENLKRRKYETLGGDIIFEPFGVETLGSWGPGAHKLFKALSKKLMDLTQDPRAGTYLAQRIAIAIQRGNAVSLLGTLPEGDDLAAFFYL

SEQ ID NO: 33274 - protein, 952 aa, Celastrina argiolus
MLSSQDAGTETDISTVSLGNLVQCSFCPQARYFKSQRGLNIHVGKCHKQLSSVTPPLPNAAYPTVFWHELSKFKCSLPVVKRIPRGARVPVAQKLAETVRKTVLENSRQAWEKLLTFPYRILHVNRDPLNNASLTSRIKKNCFSDTDLNIHFSSYSSTPKYNVVKTVENKLSMGDVKGAARLLFSSDTVAPNCPETLVALQNKHPTQISPNPPASADDTIPPLQTSADKVRGAIMSFLPGSAGGLDGLTSQHLKDLTSCCCGETGEKLLHELTNLCNLMLRGEVVTDIVDILYGANLCALKKRDGGIRPIAVGSTYRRLTAKLACKSLTFLASYFQPKQLGFACKGGCEAAVHSFRTAIHNQSGDVFLKVDVKNAFNSVDRVAMLAQIKLKAPAILPFMLQCYNDPTKLIYQNHLISSEVGCQQGDPLGPAIFSLAIQPVVELLNSKFNVWYLDDGTLGSDAHTVLSDFQNLIHELKKIGLELNLGKCELFVPDNCQDRDAIISRFKDVAPQLSIIDKGSLLLLGSPILDESLPVFIDNKLQNFCDTLDRLLQINCHMAFTIVRYCLFVPKFTYVLRCCQLWKFPELLKRLDDTLKHTLSSILNISFDHRSWTQATLPVRFGGLGIRKASDIALPAFLSSVHFNHTVISKILERSNYPLTIPFADEAKNAWDIVSAGSIVPENTSSQRLWDEPICRLVRNCLFNTSSSPAERARLLAVERWESGVWLQALPSANIGTLLDRSTFQLATALRLGAPHVVPHQCVCGANVDSYGHHGLCCTRSAGRISRHHSLNDLIRRALVTAGVPAILEPSGLARDDGKRPDGMTLVPWSVGRALVWDATCVDTLAPSHVQATSSCAGAAAYQAENLKRRKYETLGGDIIFEPFGVETLGSWGPSAHKLFKALSKKLMELTQDPRAGTYLAQRIAIAIQRGNAVSLLGTLPEGDDLAAFFYL

SEQ ID NO: 33275 - protein, 957 aa, Cyaniris semiargus
MLSTSQDAGTSTDDAIVPLEILVQCTQCPQPRYFRSERGLRIHIGKCHKESLLSSPSEASVSPSQSSTAREPFWQTISKLKQSVPVLRRIPRGARVAVAQKLAETIHKTVNENSRHAWENLLTFPYHTLHVIRDPQNNTSLTSRVKKNCATDIDLNQNFPLCSSAKNNIVKNVESKISEGDIKGAARLLFSSDTIAPNSPETVSALQKKHPHQLTSQNISDAHDAPPLQTTVDSVRGAIMSFPPGSAGGLDGITPQHLKDLTSGCCGDAGEKLLQEVTNLCNLMLRGEVASDIVDILYGANLCALRKRDGGIRPIAVGSTYRRLTAKIACRSIKSLSSYFQPKQLGFACKGGCEAAVHSFRTHIQNSKNSIYLKVDVRNAFNSIDRVAMLTQIKTKAPTILPFMLQCYREPTKLIYQNHLIQSEVGCQQGDPLGPAIFSLAIHPVIELLNSKFNVWYLDDGTLAGDASTVLSDFQTLIREFKIIGLDLNLGKCELFVPDDCEDRDEIISSVKAVAPELSVIEKSSLFLLGSPVLADSFPDYINEKARNFSESLDRLLQINSHMAFTLIRYCLFVPKFTYVLRCCQLWKFPELLHSLDDTLKHTLSTILNIKFDERSWTQATLPVRFGGLGIRKTSDTALPAFLSSVHANRAVIAKILESSSIPFVIPFADEAKDAWDIASAGSEVPKNTSSQRLWDEPVCELVRNKLFNTSTSAVERARLLAVERWESGAWLQVLPSKNTGTLLDRNTFRLATALRLGAPHVVPHQCVCGAHVGSYGHHGLCCSRSAGRFSRHHSLNDLIRRALVTAGVPAILEPSGLARDDGKRPDGMTLVPWSVGRALVWDATCVDTLASSHIQGTSSCAGAAANQAENLKRRKYENLSGDLIFEPFGVETLGAWGPGAHKLFRGISKKLVEATRDPRAGSYLAQRIAIAIQRGNAVSLLGTLPDGVDLGKFFFL

SEQ ID NO: 33276 - protein, 956 aa, Glaucopsyche alexis
MLSSSQDVGTSTDDVTVPLENLVQCTQCPQPRFFKSERGLRIHIGKCHKLSLAPSPSVVLPSQNSTEHQPFWQEISKLKNSVPILRRIPRDARVAVAQKLAETVHKTVSENSRQAWEHLFTFPYRILHVTRDPRNNASLTSLVKKNCVSDSDLHPNFYSPSSAKNNIIKNVENKISEGDIKGAARLLFSNDTIAPNSPETLTALQNKHPPQLSPHLFLDTDDAEPALQTSVDSVRGAIMSFLPGSAGGLDGLTPQHLKDLTSGCCGEAGEKLLQEVTNLCNLMLRGGVASDIVDILYGANLCALRKRDGGIRPIAVGSTYRRLTAKIACRSINSLASYFQPKQLGFACKGGCEAAVHSFRTFIKNQNNSVFLKVDVKNAFNSVNRVAMLAQIKAKAPAILPFMLQCYKEPTKLIYKNHLIPSEVGCQQGDPLGPAIFSLAIHPAIELLNSKFNVWYLDDGTLGSDASTVLSDFRTLIHEFQNIGLELNFGKCELFVPDNCEDRETVISRFKEVAPQLSVIEKGSLLLLGSPILDDSLPDFINNKLQNFTETLDRLLQINCHMAFTLIRYCLFVPKFTYVLRCCQLWKFPQLLKRLDDTIKHTLSSILNIKFDHRSWTQATLPVRFGGLGIRQTSDVALPAFLSSVHANHAVILKILERSSCPLVIPFADEAKDAWDIASAGSNVPENTFSQRLWDEPICRLVRNRLFNTSSSPVERARLLAVEKWESGVWLQALPSANTGTLLGRNTFRLATALRLGAPHVVPHQCVCGANVDSHGHHGLCCSRSAGRISRHHSLNDLIRRALVTAGVPAILEPSGLARDDGKRPDGMTLVPWSVGRALVWDATCVDTLAPSHVQGTSNCAGAAANQAENLKRRKYENLSGDLIFEPFGVETLGAWGPGAHKLFKEISKKLTEATRDPRAGNYLAQRIAIAIQRGNAISLLGTLPDGDDLGKFFYL

SEQ ID NO: 33277 - protein, 952 aa, Celastrina argiolus
MLSSQDAGTETDISTVSLGNLVQCSFCPQARYFKSQRGLNIHVGKCHKQLSSVTPPLPNAAYPTDFWHELSKFKCSLPVVKRIPRGARVPVAQKLAETVRKTVLENSRQAWEKLLTFPYRILHVNRDPLNNASLTSRIKKNCFSDTDLNIHFSSYSSTPKYNVVKTVENKLSMGDVKGAARLLFSSDTVAPNCPETLVALQNKHPTQISPNPPASADDTIPPLQTSADKVRGAIMSFLPGSAGGLDGLTSQHLKDLTSCCCGETGEKLLHELTNLCNLMLRGEVVTDIVDILYGANLCALKKRDGGIRPIAVGSTYRRLTAKLACKSLTFLASYFQPKQLGFACKGGCEAAVHSFRTAIHNQSGDVFLKVDVKNAFNSVDRVAMLAQIKLKAPAILPFMLQCYNDPTKLIYQNHLISSEVGCQQGDPLGPAIFSLAIQPVVELLNSKFNVWYLDDGTLGSDAHTVLSDFQNLIHELKKIGLELNLGKCELFVPDNCQDRDAIISRFKDVAPQLSIIDKGSLLLLGSPILDESLPVFIDNKLQNFCDTLDRLLQINCHMAFTIVRYCLFVPKFTYVLRCCQLWKFPELLKRLDDTLKHTLSSILNISFDHRSWTQATLPVRFGGLGIRKASDIALPAFLSSVHFNHTVISKILERSNYPLTIPFADEAKNAWDIVSAGSIVPENTSSQRLWDEPICRLVRNCLFNTSSSPAERARLLAVERWESGVWLQALPSANIGTLLDRSTFQLATALRLGAPHVVPHQCVCGANVDSYGHHGLCCTRSAGRISRHHSLNDLIRRALVTAGVPAILEPSGLARDDGKRPDGMTLVPWSVGRALVWDATCVDTLAPSHVQATSSCAGAAAYQAENLKRRKYETLGGDIIFEPFGVETLGSWGPGAHKLFKALSKKLMELTQDPRAGTYLAQRIAIAIQRGNAVSLLGTLPEGDDLAAFFYL

SEQ ID NO: 33278 - protein, 718 aa, Lysandra coridon
MSFPPGSAGGLDGITPQHLKDLTSGCCGDAGEKLLQEVTNLCNLMLRGDVASDIVDILYGANLCALRKRDGGIRPIAVGSTYRRLTAKIACRSMNSLSSYFQPKQLGFACKGGCEAAVHSFRTHIQNSKNTVYLKVDVKNAFNSVDRVAMLTQIKTKAPTILPFMLQCYREPTKLIYQNHLIQSEVGCQQGDPLGPAIFSLAIHPVIELLNSKFNVWYLDDGTLASDASTVLSDFQTLIHEFKIIGLDLNLGKCELFVPDDCEDRDGIVPSFKAVAPELSVIEKSSLFLLGSPILADSFPDYIKEKVQNFSESLDRLLQINSHMAFTLIRYCLFVPKLTYVLRCCQLWKFPQLLHRLDDTLKHTLSTILNINFDERSWTQATLPVRFGGLGVRKISDIALPAFLSSFHANRAVIAKILEPSSCPLVIPFADEAKDAWNIASAGSRVPENTSSQRLWDGPVGELGRNKLFNTSTSVAERARLLAVERWESGAWLRALPSKNIGTLLDRNTFRLATALRLGAPHVVPHQCVCGAHVDSYGHHGLCCSRSAGRFTRHHNLNDLIRRALVTAGVPAILEPSGLARDDGKRPDGMTLVPWNMGRALVWDATCVDTLASSHVQGTSSCAGAAANQAENLKRRKYENLSGDLIFEPFGVETLGAWGPGAHKVFREISKRLTEATRDPRAGSYLAQRIAIAIQRGNAVSLLGTLPDGDDMGKFFFL

SEQ ID NO: 33279 - protein, 957 aa, Lysandra coridon
MLSNSQEAGTSSDDAILPLESLVHCSQCPQPRCFRSERGLRIHIGKCHKQTVLPSPSEASVPPSQNSAREPFWKTISNLKQSVPVLRRIPRGARVAVAQKLAESIRQTVNDNSRQAWEKLLTFPYRTLHVIRDPQNNASLTSRVKKNCTTEIDLTQHFSLGPSTKNNIVKNVENKISEGDIKGAARLLFSSDTIAPNSPETVLALQNKHPQQLTSQPFSDAHDVAPPFQTTVDSVREAIMSFPPGSAGGLDGITPQHLKDLTSGCCGDAGEKLLQEVTNLCNLMLRGEVASDIVDILYGANLCALRKRDGGIRPIAVGSTYRRLTAKIACRSMNSLSSYFQPKQLGFACKGGCEAAVHSFRTHIQNSKNTVYLKVDVKNAFNSVDRVAMLTQIKTKAPTILPFMLQCYQEPTKLIYRNHLIQSEVGCQQGDPLGPAIFSLAIHPVIELLNSKFNVWYLDDGTLASGPSTVLSDFQTLIREFKIIGLDLNLEKCELFVPDDCENRNEIISNFKAVAPELSVTEKSSLFLLGSPILADSFPDYINEKIQNFSESLDRLLQINSHMAFTLIRHCLFVPKFTYVLRCCQLWKFPQLLHSLDDTLKHTLSTILNIKFDERSWTQATLPVRFGGLGIRKTFDVALPAFLSSVHANRQVIAKILEPSSCPLDIPFADEAKDAWDIACAGSEVPVNTSSQRLWDGPVCELVRNKLLNTSTSVAERARLLAVERWESGAWLQALPSKNTGTLLDRNTFRLATALRLGAPHVVPHQCVCGTHVDSYGHHGLCCLRSAGRFSRHHSLNDLIRRALVTAGVPAILEPSGLVRDDGKRPDGMTLVPWNVGRALVWDATCVDTLAPSHVQGTSSCAGAAANQAENLKRRKYENLGGDFIFEPFGVETLGAWGPGAHKLFSEISKRLIEATRDPRAGSYLAQRIAIAIQRGNAVSLLGTLPDGDDLGKFFFL

SEQ ID NO: 33280 - protein, 955 aa, Glaucopsyche alexis
MLSSSQDVGTSTDDVTVPLENLVQCTQCPQPRYFKSERGLRIHIGKCHKLSLAPSSVVLPSQNSTEHQPFWQEISKLKNSVPILRRIPRGARVAVAQKLAETVHKTVSENSRQAWEHLFTFPYRILHVTRDPRNNASLTSLVKKNCVSDSDLHPNFSSPSSAKNNIIKNVENKISEGDIKGAARLLFSNDTIAPNSPETLTALQNKHPPQLSPHLFLDTDDAEPALQTSVDSVRGAIMSFLPGSAGGLDGLTPQHLKDLTSGCCGEAGEKLLQEVTYLCNLMLRGGVASDIVDILYGANLCALRKRDGGIRPIAVGSTYRRLTAKIACRSINSLASYFQPKQLGFACKGGCEAAVHSFRTFIKNQNNSVFLKVDVKNAFNSVNRVAMLAQIKAKAPAILPFMLQCYKEPTKLIYKNHLIPSEVGCQQGDPLGPAIFSLAIHPAIELLNSKFNVWYLDDGTLGSDASTVLSDFRTLIHEFQNIGLELNFGKCELFVPDNCEDRETVISRFKEVAPQLSVIEKGSLLLLGSPILDDSLPDFINNKLQNFTETLDRLLQINCHMAFTLIRYCLFVPKFTYVLRCCQLWKFPQLLKRLDDTIKHTLSSILNIKFDHRSWTQATLPVRFGGLGIRQTSDVALPAFLSSVHANHAVILKILERSSCPLVIPFADEAKDAWDIASAGSNVPENTFSQRLWDEPICRLVRNRLFNTSSSPVERARLLAVEKWESGVWLQALPSANTGTLLGRNTFRLATALRLGAPHVVPHQCVCGANVDSHGHHGLCCSRSAGRISRHHSLNDLIRRALVTAGVPAILEPSGLARDDGKRPDGMTLVPWSVGRALVWDATCVDTLAPSHVQGTSNCAGAAANQAENLKRRKYENLSGDLIFEPFGVETLGAWGPGAHKLFKEISKKLTEATRDPRAGNYLAQRIAIAIQRGNAISLLGTLPDGDDLGKFFYL

SEQ ID NO: 33281 - protein, 905 aa, Glaucopsyche alexis
MLSSSQDVGTSTDDVTVPLENLVQCLQCPQPRYFKSERGLRIHIGKCHKQSLAPSPSVILPSQNSNEHQPFWQEISKLKNSVPILRRIPRSARVAVAQKLAETVHKTVNENSRQAWEHLFTFPYRILHVTRDPHNNASLTSLIKKNCVSDFDFKSNFSLLSSVKNNSLKNVENKISEGDIKGAARLLFSNDTIAPNSPETLTALQNKHPPQLSPHVFLDTDDVEPALQTSVDSIRGAIMSFLPGSAGGLDGLTPQHLKDLTGGCCGEAGEKLLQEVTNLCNLMLRGEVASDVVDILYGANLCALRKRDGGIRPIAVDSTYRRLTAKIACRSINSLASYFQPKQLGFACKGGCEAAVHSFRTFIKNQNENVFLKVDVKNAFNSVNRVAMLAEIKAKAPAILPFMLQCYKEPTKLIYKNHLISSEVGCQQGDPLGPAIFSLAIHPAIELLNSKFNVWYLDDGTLGSDASTVLSDFRTLIHEFQNIGLELNFGKCELFVPDTCQDREAVISRFKEVAPQISVIEKSSLLLLGSPILDDSLPDFINSKLQDFSETLNRLLQINCHMAFTLIRYCLFVPKFTYVLRCCQLWKFPQLLKRLDDTIKHTLSSILNINFDYRSWTQATLPVRFGGLGIRQTSDVALPAFLSSVHANHAVISKILERSSCPLNIPFANEAKDTWGIASAGSNVPENTFSQRLWDEPICRLVRNRLFNTSSSPAERARLLAVEKWESGVWLHALPSANTGTLLGRNTFRLATALRLGAPHVVPHQCVCGANVDSHGHHGLCCSRSAGRISRHHSLNDLIRRALVTAGVPAILEPSGLARDDGKRPDGMTLVPWSVGRALVWDATCVDTLAPSHVQGTSNCAGAAANQAENLKRRKYENLSGDLIFEPFGVETLGAWGPGAHKLFK

SEQ ID NO: 33282 - protein, 958 aa, Aricia agestis
MLSNSQDAGTSTDDAIVPLEILVQCTQCPQPRYFRSERGLRIHRGKCHKEPLLSSPSDASVSPSQNSTAREPFWQTISKLKQSVPVLRRIPRGARVAVAQKLAETIHKTVNENSRQAWENLLTFPYRTLHVTRDPQNNTSLTSRVKKNCASDIVLNQNFPLCSSGKNNIVKNVENKISEGDIKGAARLLFSSDTIAPNSPETVSALQKKHPHQLTSQHISDAHDGTPPLQTTVDSVRGAIMSFPPGSAGGLDGITSQHLKDLTSGCCGDAGEKLLQEVTNLCNLMLRGEVASDIVDILYGANLCALRKRDGGIRPIAVGSTYRRLTAKIACRSIKSLSSYFQPKQLGFACKGGCEAAVHSFRTHVQNSKNSIYLKVDVSNAFNSVDRVAMLTQIKTKAPTILPFMLQCYRDPTKLIYQNHLIQSEVGCQQGDPLGPAIFSLAIHPVIELLNSKFNVWYLDDGTLASDASTVLSDFQTLIREFKIIGLDLNLGKCELFVPDDCGDRDEIISSFKAVAPELSVIEKSALFLLGSPVLADSFPDYINEKTRNFSESLDRLLQINSHMAFTLIRYCLFVPKFTYALRCCQLWKFPELLHSLDDTLKHTLSTILNIKFDERSWTQATLPVRFGGLGIRKTSDTALPAFLSSVHANRAVIAKILEPSSCPFVIPFADEAKDEWDIASAGSEVPKNTSSQRLWDEPICELVRNKLFNTSTSAVERARLLAVERWESGAWLQALPSKNTGTLLDRNTFRLATALRLGVPHVVPHQCVCGARVDSYGHHGLCCSRSAGRFSRHHNLNDLIRRALVTAGVPAILEPSGLARDDGKRPDGMTLVPWNVGRALVWDATCVDTFASSHIQSTSSCAGAAANQAENLKRRKYENLSGDLIFEPFGVETLGAWGPGAHKLFRGISKKLVEATRDPRAGSYLAQRIAIAIQRGNAVSLLGTLPDGDDLGKFFFL

SEQ ID NO: 33283 - protein, 952 aa, Celastrina argiolus
MLSSQDAGTETDISTVSLGNLVQCSFCPQARYFKSQRGLNIHVGKCHKQLSSVTPPLPNAAYPTDFWHELSKFKCSLPVVKRIPRGARVPVAQKLAETVRKTVLENSRQAWKKLLTFPYRILHVNRDPLNNASLTSRIKKNCFSDTDLNIHFSSYSSTPKYNVVKTVENKLSMGDVKGAARLLFSSDTVAPDCPETLVALQNKHPTQISPNPPASADDTIQPLQTSADKVRGAIMSFLPGSAGGLDGLTSQHLKDLTSCCCGETGEKLLHELTNLCNLMLRGEVVTDIVDILYGANLCALKKRDGGIRPIAVGSTYRRLTAKLACKSLTFLASYFQPKQLGFACKGGCEAAVHSFRTAIHNQSGDVFLKVDVKNAFNSVDRVAMLAQIKLKAPAILPFMLQCYNDPTKLIYQNHLISSEVGCQQGDPLGPAIFSLAIQPVVELLNSKFNVWYLDDGTLGSDAHTVLSDFQNLIHELKKIGLELNLGKCELFVPDNCQDRDAIISRFKDVAPQLSIIDKGSLLLLGSPILDESVPDFIDNKLQNFCDTLDRLLQINCHMAFTIVRYCLFVPKFTYVLRCCQLWKFPELLKRLDDTLKHTLSSILNISFDHRSWTQATLPVRFGGLGIRKASDIALPAFLSSVHFNHTVISKILERSNYPLTIPFADEAKNAWDIVSAGSIVPENTSSQRLWDEPICRLVRNCLFNTSSSPAERARLLAVERWESGVWLQALPSANIGTLLDRSTFQLATALRLGAPHVVPHQCVCGANVDSYGHHGLCCTRSAGRISRHHSLNDLIRRALVTAGVPAILEPSGLARDDGKRPDGMTLVPWSVGRALVWDATCVDTLAPSHVQATSSCAGAAAYQAENLKRRKYETLGGDIIFEPFGVETLGSWGPGAHKLFKALSKKLMELTQDPRAGTYLAQRIAIAIQRGNAVSLLGTLPEGDDLAAFFYL

SEQ ID NO: 33284 - protein, 960 aa, Plebejus argus
MLSNSQDAGTSSDHAILPKEKESLVHCSQCPQPRYFRSVRGLRIHIGKCHKQPVLPSPSEASVPPSQNSTVREPFWQRISSLKQSVPVLRRIPRGARVAVAQKLAETIHQTVNDNSRQAWEKLLTFPYRTLHVTRDPQNNASLTSRVKNNCTNEIDLTQHFSLGPSTKNNIVKNVENKISEGDIKGAARLLFSSDTIAPNSPETVLALQNKHPQQLTSQPFPDAHDVTPPLQTSVDSVRGAIMSFPPGSAGGLDGITPQHLKDLTSGCCGDAGEKLLQEVTNLCNLMLRGEVAPDIVDILYGANLCALRKRDGGIRPIAVGSTYRRLTAKIACRSMNSLSSYFQPKQLGFACKGGCEAAVHSFRTHIQNSKNTVYLKVDVKNAFNSVDRVAMLTQIKNKAPTILPFMLQCYQEPTKLIYRNHLIQSEVGCQQGDPLGPAIFSLAIHPVIELLNSKFNVWYLDDGTLASDASTVLSDFQTLIREFQIIGLDLNLGKSELFVPDDCENRDEIISSFKAVSPELSVTEKSSLFLLGSPILADSFPDYINEKIQNFSESLDRLLQINSQMAFTLIRHCLFVPKFTYVLRCCQLWKFPQLLHSLDDTLKHTLSTILNIQFDERSWTQATLPVRFGGLGIRKTFDVALPAFLSSVHANRQVIARILEPSSCPLDIPFADEAKDAWDIASAGSEVPKNTSSQRLWDGPVCELVRNKLLNTSTSVAERARLLAVERWESGAWLQALPSKNTGTLLDRNTFRLATALRLGSPHVVPHQCVCGAHVDSYGHHGLCCSRSAGRFSRHHSLNDLIRRALVTAGVPAILEPSGLVRDDGKRPDGMTLVPWNVGRALVWDATCVDTLASSHVQGTSSCAGAAANQAENLKRRKYENLSGDLIFEPFGVETLGAWGPGAHRLFREISKRLIEATRDPRAGSYLAQRIAIAIQRGNAVSLLGTLPSGDDLGKFFFL

SEQ ID NO: 33285 - protein, 951 aa, Glaucopsyche alexis
MTRSQDAGTSTDITTVSLGNLQQCSHCSRYFKSQRGLNIHVGKCHKQLPTLIPLITTSLPNPIYQTSFWQKISKFKRFVPVLKRIPRGARVTVAQKLAETIRHTVLENSRQAWENLLTFPYRFLHVTRDPLNNASLTSRIKKNCVSDIDLNPNFSLHSSAKFNLVKSVENKISEGDIKSAARLLFSNDTVAPDCPETLIALQNKHPSQSNPFTASDDALPPLQTSADKVRGAIMSFLPGSAGGLDGLTPQHLKDLTSGCCGEAGEKLLNELTNLCNLMLRGGVASDIVDILYGANLCALKKRDGGICPIAVGSTYRRLTAKLTCKSITSLASYFQPKQLGFACKGGCEAAVHSFRTAIHNQGDDVFLKVDVKNAFNSVERGAMLAQIKSKAPAILPFILQCYNDPTKLIYKDHLISFEVGCQQGDPLGPAIFSLAIHPVIELLNSKFNVWYLDDGTIGSDAPTVLSDFQTLIREFQKIGLELNLGKCELFVPDSCEDRNAIISSFKEIAPQLSVIDKDSLFLLGSPILDESLPEFINNKLQNFSETLDRLLQINCHMAFTLIRYCVFVPKFTYVLRCCQLWKFPQLLKQLDDTIRHTLSTILNISFDDRSWTQATLPVRFGGLGVRKPSDISLPAYLSSVHANHRLIFKILEHQSYSIIVPFLDEAKDVWSATSACSELPDNVFSQRLWDEPLCRLVRNNLLNTSSSPVEQARLLAAEKWESGLWLLALPSPNTGTLLDRTAFRIATSLRLGTSHVVPHRCVCGANVDSLGHHGLSCQRSAGRISRHHCLNDLIRRALVTAGIPAVLEPSGLARDDGKRPDGMTLVPWRVGRALVWDATCVDTLATSHVQGTSSTAGAAANQAENFKRRKYENLSGDLIFEPFGVETLGSWGPGAHKLFREISKKLIEATRDPRAGTYLAQRVSIAIQRGNSLSLLGTLPGGDDLGDFFLL

SEQ ID NO: 33286 - protein, 956 aa, Glaucopsyche alexis
MLSSSQDVGTSTDDVTVPLENLVQCTQCPQPRYFKSERGLRIHIGKCHKLSLAPSPSVVLPSQNSTEHQPFWQEISKLKNSVPILRRIPRGARVAVAQKLAETVHKTVSENSRQAWEHLFTFPYRILHVTRDPRNNASLTSLVKKNCVSDSDLHPNFYSPSSAKNNIIKNVENKISEGDIKGAARLLFSNDTIAPNSPETLTALQNKHPPQLSPHLFLDTDDAEPALQTSVDSVRGAIMSFLPGSAGGLDGLTPQHLKDLTSGCCGEAGEKLLQEVTNLCNLMLRGGVASDIVDILYGANLCALRKRDGGIRPIAVGSTYRRLTAKIACRSINSLASYFQPKQLGFACKGGCEAAVHSFRTFIKNQNNSVFLKVDVKNAFNSVNRVAMLAQIKAKAPAILPFMLQCYKEPTKLIYKNHLIPSEVGCQQGDPLGPAIFSLAIHPAIELLNSKFNVWYLDDGTLGSDASTVLSDFRTLIHEFQNIGLELNFGKCELFVPDNCEDRETVISRFKEVAPQLSVIEKGSLLLLGSPILDDSLPDFINNKLQNFTETLDRLLQINCHMAFTLIRYCLFVPKFTYVLRCCQLWKFPQLLKRLDDTIKHTLSSILNIKFDHRSWTQATLPVRFGGLGIRQTSDVALPAFLSSVHANHAVILKILERSSCPLVIPFADEAKDAWDIASAGSNVPENTFSQRLWDEPICRLVRNRLFNTSSSPVERARLLAVEKWESGVWLQALPSANTGTLLGRNTFRLATALRLGAPHVVPHQCVCGANVDSHGHHGLCCSRSAGRISRHHSLNDLIRRALVTAGVPAILEPSGLARDDGKRPDGMTLVPWSVGRALVWDATCVDTLAPSHVQGTSNCAGAAANQAENLKRRKYENLSGDLIFEPFGVETLGAWGPGAHKLFKEISKKLTEATRDPRAGNYLAQRIAIAIQRGNAISLLGTLPDGDDLGKFFYL

SEQ ID NO: 33287 - protein, 951 aa, Glaucopsyche alexis
MSSSQDAGTSTNISTVSLENLLLCSHCSRFFKSQRGLNIHVGKCHKQFVTLIPPITNSLPNPIHQTNFWQETSKFKRFTPVLKRIPRGARVTVAQKLAETIRHTVLENSRQAWENLLTFPYRFLHVTRDPLNNASLTSRIKKNCVSDIALNPHFSSNSPVKHNLLKTVENKISEGDIKGAARLLFSNDTVAPDCPKTLIALQNKHPSQSNPFITSDDALPPLQTSTDKIRGAIMSFLPGSAGGLDGLTPQHLKDLTSGCCGEAGEKLLHELTNLCNLMLRGGVASDIVDILYGANLCALKKRDGGIRPIAVGSTYRRLTAKLACKSVTSLASYFQPKQLGFACKGGCEAAVHSFRTAIHNQGDDVFLKVDVKNAFNSVGRGAMLAQIKSKAPAILPFLLQCYNDPTKLIFKDHLISSEAGCQQGDPLGPAIFSLAIHPVIELLNSKFNVWYLDDGTLGSDAPTVLSDFRTLIREFQKIGLELNLGKCELFVPDSCGDRNAIISSFKEIAPQLSVIDKDSLFLLGSPILDASLPDFIDSKLQNFSEFLDRLLQINCHMAFTLIRYCIFVPKLTYVLRCCQLWKFPQLLKQLDNTIRHTLSTILNINFDDRAWTQATLPVRFGGLGVRKPSDISLPAFLSSVHANYSLISKILQHTSYSNTVPFLDEAKDAWSATSACSRLPDNTFSQRLWDEPLCRLVRNNLLNTSSSPVEQARLLAAEKWESGLWLQALPSPNTGTLLDRTAFRLATSLRLGTPHVVPHRCVCGANVDSLGHHGLSCQRSAGRISRHHCLNDLIRRALVTAGVPAVLEPSGLARDDGKRPDGMTLVPWKVGRALVWDATCVDTLAPSHVQGTSSTAGAAANQAENLKRRKYENLSGDLIFEPFGVETLGTWGPGAHKLFREISKKLIEATRDPRAGTYLAQRVSIAIQRGNSLSLLGTLPGGDDLGDFFFL

SEQ ID NO: 33288 - protein, 916 aa, Glaucopsyche alexis
MLSRSQDVGTSTDTVTVPLENLVQCTQCPQPRYFQSERGLRIHIGKCHKLSLAPSPSVVLPSQNSTEHQPFWQEISKLKNSVPMLRRIPRGARVAVASLTSLVKKNCVSDFDLHPNFSLPSSAKNNIIKNVENKISEGDIKGAARLLFSNDTIAPNSPETLTALQNKHPPQLSPHLFLDTDDAEPALQTSVDSVRGAIMSFLPGSAGGLDGLTPQHLKDLTSGCCGEAGEKLLQEVTNLYNLMLRGGVASDIVDILYGANLCALRKRDGGIRPIAVGSTYRRLTAKIACRSINSLASYFQPKQLGFACKGGCEAAVHSFRTFIKNQNNSVFLKVDVKNAFNSVNRVAMLAQIKAKAPAILPFMLQCYKEPTKLIYKNHLIPSEVGCQQADPLGPAIFSLAIHPAIELLNSKFNVWYLDDGTLGSDASTVLSDFRTLIHEFQNIGLELNFGKCELFVPDNCEDRETVISRFKEVAPQLSVIEKGSLLLLGSPILDDSLPDFINNKLQNFTGTLDRLLQINCHMAFTLIRYCLFVPKFTYVLRCCQLWKFPQLLKRLDDTIKHTLSSILNIKFDHRSWTQATLPVRFGGLGIRQTSDVALPAFLSSVHANHAVILKILERSSCPLVIPFADEAKDAWDIASAGSNVPENTFSQRLWNEPICRLVRNRLINTCSSPVERARLLAVEKWESGVWLQALPSANTGTLLGRNTFRLATALRLGAPHVVPHQCVCGANVDSHGHHGLCCSRSAGRISRHHSLNDLIRRALVTAGVPAILEPSGLARDDGKRPDGMTLVPWSVGRALVWDATCVDTLAPSHVQGTSNCAGAAANQPENLKRRKYENLSGDLIFEPFGVETLGAWGPGAHKLFKEISKKLTEATRDPRAGNYLAQRIAIAIQRGNAISLLGILPDGDDLGKFFYL

SEQ ID NO: 33289 - protein, 933 aa, Celastrina argiolus
MNKMNNICPQARYFKSQRGLNIHVGKCHKQLSSVTPPLPNAAYPTDFWHELSKFKCSLPVVKRIPRGARVPVAQKLAETVRKTVLENSRQAWEKLLTFPYRILHVNRDPLNNASLTSRIKKNCFSDTDLNIHFSSYSSTPKYNVVKTVENKLSMGDVKGAARLLFSSDTVAPDCPETLVALQNKHPTQISPNPPASADDTIPPLQTSADKVRGAIMSFLPGSAGGLDGLTSQHLKDLTSCCCGETGEKLLHELTNLCNLMLRGEVVTDIVDILYGANLCALKKRDGGIRPIAVGSTYRRLTAKLACKSLTFLASYFQPKQLGFACKGGCEAAVHSFRTAIHNQSGDVFLKVDVKNAFNSVDRVAMLAQIKLKAPAILPFMLQCYNDPTKLIYQNHLISSEVDCQQGDPLGPAIFSLAIQPVVELLNSKFNVWYLDDGTLGSDAHTVLSDFQNLIHELKKIGLELNLGKCELFVPDNCQDRDAIISRFKDVAPQLSIIDKGSLLLLGSPILDESLPDFIDNKLQNFCDTLDRLLQINCHMAFTIVRYCLFVPKFTYVLRCCQLWKFPELLKRLDDTLKHTLSSILNISFDHRSWTQATLPVRFGGLGIRKASDIALPAFLSSVHFNHTVISKILERSNYPLTIPFADEAKNAWDIVSAGSIVPENTSSQRLWDEPICRLVRNCLFNTSSSPAERARLLAVERWESGVWLQALPSANIGTLLDRSTFQLATALRLGAPHVVPHQCVCGANVDSYGHHGLCCTRSAGRISRHHSLNDLIRRALVTAGVPAILEPSGLARDDGKRPDGMTLVPWSVGRALVWDATCVDTLAPSHVQATSSCAGAAAYQAENLKRRKYETLGGDIIFEPFGVETLGSWGPGAHKLFKALSKKLMELTQDPRAGTYLAQRIAIAIQRGNAVSLLGTLPEGDDLAAFFYL

SEQ ID NO: 33290 - protein, 916 aa, Celastrina argiolus
MSIDYQLTISSQDAGTSTDNTATVSLGNLLQCDHCPQARFFKSQRGLNIHIGRCHKQFSATCPPTTHGDVVSNPTCQQVFWQQISKFKCFTPVLKRIPRGARVTVAQKLTETVRHTVHENSKQAWEKLLTFPYRILHVTRDPLNNASLTARVKKNCFLDSDTNPDFSIHSSTKYNVMKNVENKISEGDIKGAARLLFSNDTIAPDCPETFIALQNKHPSQLTPNHFTDIANTTSPLQTSTDKVRGAIMSFLPGSAGGLDGLTPQHLKDLTSGCCGEAGEKLLHELTNLCNLMLRGEVASDIVDILYGANLCALKKRDGGIRPIAVGCTYRRLTAKLACKSVTSLASYFQPIQLGFACRGGCEAAVHSFRTAVQNQDDNVFLKVDVKNAFNSVDRATMLARIKSKAPAILPFMLQCYNDPTKLIYKNHLIQSEVGCQQGDPLGPAIFSLTIHPVIEQLNSKFNIWYLDDGTLGSDATTVLSDFNTLIREFKNIGLELNLGKCELFVPDSCGNRNDIISSFQKIAPQISVIDKDSLFLLGSPILNESLPVFVKNKLQNFSESLDRLLQINCHMAFTLIRYCLFVPKFTYVLRCCQLWKFPELLKQLDDTVRHTLSTILNINFNDRSWTQATLPVRFGGLGVRKPSNISLPAFLSSIHANRNLIYQILQNTSLSNRVPFLDEAKDAWLASSACSELPVNTSSQKLWDEPLCRLTRNNLLNTSSSPADQARLLAAEKWESGLWLQVLPSPNTGTLLDKTTFRLATSLRLGIPHVVPHSCVCGAHVDSLGHHGLSCRRSAGRISRHHSLNDLIRRALATAGVPAVLEPAGLARDDGKRPDGMTLVPWRVGRALVWDATCVDTLAPSHVQGTSSVAGAAANQAENLKRRKYENLSGDLIFEPFGVETLGPWGPGAHKLFGQI

SEQ ID NO: 33291 - protein, 952 aa, Celastrina argiolus
MLSSQDAGTETDISTVSLGNLVQCSFCPQARYFKSQRGLNIHVGKCHKQLSSVTPPLPNAAYPTDFWHELSKFKCSLPVVKRIPRGARVPVAQKLAETVRKTVLENSRQAWEKLLTFPYRILHVNRDPLNNASLTSRIKKNCFSDTDLNIHFSSYSSTPKYNVVKTVENKLSMGDVKGAARLLFSSDTVAPNCPETLVALQNKHPTQISPNPPASADDTIPPLQTSADKVRGAIMSFLPGSAGGLDGLTSQHLKDLTSCCCGETGEKLLHELTNLCNLMLRGEVVTDIVDILYGANLCALMKRDGGIRPIAVGSTYRRLTAKLACKSLTFLASYFQPKQLGFACKGGCEAAVHSFRTAIHNQSGDVFLKVDVKNAFNSVDRVAMLAQIKLKAPAILPFMLQCYNDPTKLIYQNHLISSEVGCQQGDPLGPAIFSLAIQPVVELLNSKFNVWYLDDGTLGSDAHTVLSDFQNLIHELKKIGLELNLGKCELFVPDNCQDRDAIISRFKDVAPQLSIIDKGSLLLLGSPILDESLPDFIDNKLQNFCDTLDRLLQINCHMAFTIVRYCLFVPKFTYVLRCCQLWKFPELLKRLDDTLKHTLSSILNISFDHRSWTQATLPVRFGGLGIRKASDIALPAFLSSVHFNHTVISKILERSNYPLTIPFADEAKNAWDIVSAGSIVPENTSSQRLWDEPICRLVRNCLFNTSSSPAERARLLAVERWESGVWLQALPSANIGTLLDRSTFQLATALRLGAPHVVPHQCVCGANVDSYGHHGLCCTRSAGRISRHHSLNDLIRRALVTAGVPAILEPSGLARDDGKRPDGMTLVPWSVGRALVWDATCVDTLAPSHVQATSSCAGAAAYQAENLKRRKYETLGGDIIFEPFGVETLGSWGPGAHKLFKALSKKLMELTQDPRAGTYLAQRIAIAIQRGNAVSLLGTLPEGDDLAAFFYL

SEQ ID NO: 33292 - protein, 963 aa, Bembecia ichneumoniformis
MLSRSQDAGTSTDNATVSSENLVQCLQCPQIRYFKSERGLRIHIGKCHKQRSVQTAILTPPHNSTPHQQPFWQEISTLKHSIPILKRIPKGARVAVAHNLAQAVHNTVRDNSRQAWEKLLSFPYRILHITRDPHNSASLTSRVKKNCNSNNDLNQSFSFSSLPKYNLFKSVENKISEGDIKGAARLLFSNDTIASNCSETLTALQNKHPRFQSSKFQLPPNFFQANDDVITPPLQTSAEKVRGAIISFPPGSAGGLDGLTPQHLKDLTSGCCGEAGETLLQELTSLCNLMLRGEVTSDIVDVLYGANLCALRKRDGGIRPIAVGSTYRRLTAKIACKSVNFLSSYFQPKQLGFACKGGCEAAVHSFRSAILNQGGDVFLKVDVKNAFNSVNRVAMLAQIKSKAPAILPFMIQCYNDPTKLLYKNHLISSEVGCQQGDPLGPAIFSLAIHPVIELLNSKFNVWYLDDGTLGSDASTVLSDFRTLILEFQNIGLDLNFAKCELFVTDNCVDRDAVISSFKEIAPQLSVIDKKSLHLLGSPILDESLPDFINSKLQNFSEILDRLLKINSHMAFSLIRYCLFVPKFTYVLRCCQLWKFPQLLSCLDNTIRHTLSSILNIRFDHRSWTQATLPIRFGGLGIRKTSDVSLPAFLSSTHANHALIYQILGRSSCSVPVPYTDEAKDAWRIACANSDIPVNTSSQRLWDEPLCRLLQNNLINTSSSPAEHARLLAVEKWESGLWLKALPSPNTGTLLDPTTFRLATALHLGAPHVIPHRCVCGTNVDSLGHHGLSCQRSAGRISRHHTLNDLIRRALVTAGVPAILEPSGLARDDGRRPDGMTLVPWKAGRPLVWDATCVDTLAPSHLQSTSNIAGAAANHAENLKRHKYENLSGDFIFVPFGVETLGTWGPGAHKLFREISKKLTETTRDPRAGNYLAQRISLTIQRGNALSLLGTLPDGDGLGLFFNL

SEQ ID NO: 33293 - protein, 963 aa, Bembecia ichneumoniformis
MLSRSQDAGTSTDNATVSSENLVQCLQCPQIRYFKSERGLRIHIGKCHKQRSVQTAILTPPHNSTPHQQPFWQEISTLKHSIPILKRIPKGARVAVAHNLAQAVHNTVRDNSRQAWEKLLSFPYRILHITRDPHNSASLTSRVKKNCNSNNDLNQYFSFSSSPKYNLFKSVENKISEGDIKGAARLLFSNDTIASNCSETLTALQNKHPRFQSSKFQLPPNFFQANDDVITPPLQTSAEKVRGAIISFPPGSAGGLDGLTPQHLKDLTSGCCGEAGETLLQELTSLCNLMLRGEVTSDIVDVLYGANLCALRKRDGGIRPIAVGSTYRRLTAKIECKSVNFLSSYFQPKQLGFACKGGCEAAVHSFRSAILNQGGDVFLKVDVKNAFNSVNRVAMLAQIKSKAPAILPFMIQCYNDPTKLLYKNHLISSEVGCQQGDPLGPAIFSLAIHPVIELLNSKFNVWYLDDGTLGGDASIVLSDFRTLILEFQKIGLDLNFAKCELFVTDNCVDRDAVISSFKEIAPQLSVIDKKSLHLLGSPILDESLPDFINSKLQNFSEILDRLLKINSHMAFSLIRYCLFVPKFTYVLRCCQLWKFPQLLSCLDNTIRHTLSSILNIRFDHRSWTQATLPIRFGGLGIRKTSDVSLPAFLSSTHANHALIYQILGRSSCSVPVPYTDEAKDAWRIACANSDIPVNTSSQRLWDEPLCRLLQNNLINTSSSPAEHARLLAVEKWESGLWLKALPSPNTGTLLDPTTFRLATALHLGAPHVIPHRCVCGTNVDSLGHHGLSCQRSAGRISRHHTLNDLIRRALVTAGVPAILEPSGLARDDGRRPDGMTLVPWKAGRPLVWDATCVDTLAPSHLQGTSNIAGAAANHAENLKRHKYENLSGDFIFVPFGVETLGTWGPGAHKLFREISKKLTETTRDPRAGNYLAQRISLTIQRGNALSLLGTLPDGDGLGLFFNL

SEQ ID NO: 33294 - protein, 951 aa, Glaucopsyche alexis
MTRSQDAGTSTDITTVSLGNLQQCSHCSRYFKSQRGLNIHVGKCHKQLPTLIPLITTSLPNPIYQTSFWQKISKFKRFVPVLKRIPRGARVTVAQKLAETIRHTVQENSRQAWENLLTFPYRFLHVTRDPLNNASLTSRIKKNCVSDIDLNPNFSLHSSAKFNLVKSVENKISEGDIKGAARLLFSNDTVAPDCPETLIALQNKHPSQSNPFTASDDALPPLQTSADKVRGAIMSFLPGSAGGLDGLTPQHLKDLTSGCCGEAGEKLLNELTNLCNLMLRGGVASDIVDILYGANLCALKKRDGGIRPIAVGSTYRRLTAKLACKSITSLASYFQPKQLGFACKGGCEAAVHSFRTAIHNQGDDVFLKVDVKNAFNSVERGAMLAQIKSKAPAILPFILQCYNDPTKLIYKDHLISSEVGCQQGDPFGLAIFSLAIHPVIELLNSKFNVWYLDDGTIGSDAPTVLSDFQTLIREFQKIGLELNLGKCELFVPDSCEDRNAIISSFKEIATQLSVIDKDSLFLLGSPILDESLPEFINNKLQNFSETLDRLLQINCHMAFTLIRYCVFVPKFTYVLRCCQLWKFPQLLKQLDDTIRHTLSTILNISFDDRSWTQATLPVRFGGLGVRKPSDISLPAYLSSVHANHRLIFKILEHQSYSIIVPFLDEAKDVWSATSACSELPDNVFSQRLWDEPLCRLVRNNLLNTSSSPVEQARLLAAEKWESGLWLQALPSPNTGTLLDRTAFRIATSLRLGTSHVVPHRCVCGANVDSLGHHGLSCQRSAGRISRHHCLNDLIRRALVTAGVPAVLEPSGLARDDGKRPDGMTLVPWRVGRALVWDATCVDTLAPPHVQGTSSTAGAAANQAENFKRRKYENLSGDLIFEPFGVETLGSWGPGAHKLFREISKKLIEATRDPRAGTYLAQRVSIAIQRGNSLSLLGTLPGGDDLGDFFLL

SEQ ID NO: 33295 - protein, 958 aa, Aricia agestis
MLSNSQDAGTSTDDAIVPLEILVQCTQCPQPRYFRSERGLRIHRGKCHKEPLLSSPSDASVSPSQNSTAREPFWQTISKLKQSVPVLRRIPRGARVAVAQKLAETIHKTVNENSRQAWENLLTFPYRTLHVTRDPQNNTSLTSRVKKNCASDIVLNQNFPLCSSGKNNIVKNVENKISEGDIKGAARLLFSSDTIAPNSPETVSALQKKHPHQLTSQHISDAHDGTPPLQTTVDSVRGAIMSFPPGSAGGLDGITSQHLKDLTSGCCGDAGEKLLQEVTNLCNLMLRGEVASDIVDILYGANLCALRKRDGGIRPIAVGSTYRRLTAKIACRSIKSLSSYFQPKQLGFACKGGCEAAVHSFRTHVQNSKNSIYLKVDVSNAFNSVDRVAMLTQIKTKAPTILPFMLQCYRDPTKLIYQNHLIQSEVGCQQGDPLGPAIFSLAIHPVIELLNSKFNVWYLDDGTLASDASTVLSDFQTLIREFKIIGLDLNLGKCELFVPDDCGDRDEIISSFKAVAPELSVIEKSALFLLGSPVLADSFPDYINEKTRNFSESLDRLLQINSHMAFTLIRYCLFVPKFTYALRCCQLWKFPELLHSLDDTLKHTLSTILNIKFDERSWTQATLPVRFGGLGIRKTSDTALPAFLSSVHANRAVIAKILEPSSCPFVIPFADEAKDAWDIASAGSEVPKNTSSQRLWDEPICELVRNKLFNTSTSAVERARLLAVERWESGAWLQALPSKNTGTLLDRNTFRLATALRLGVPHVVPHQCVCGARVDSYGHHGLCCSRSAGRFSRHHNLNDLIRRALVTAGVPAILEPSGLARDDGKRPDGMTLVPWNVGRALVWDATCVDTLASSHIQCTSSCAGAAANQAENLKRRKYENLSGDLIFEPFGVETLGAWGPGAHKLFRGISKKLVEATRDPRAGSYLAQRIAIAIQRGNAVSLLGTLPDGDDLGKFFFL

SEQ ID NO: 33296 - protein, 958 aa, Lysandra coridon
MLRNSQDAGTSTDDAIQPLENLVQCSQCPQPRYFRSERGLRIHIGKCHKQPLLSSPSETSVPPSQNSTAREPFWQTLSKLKHSVPVLRRIPRGARVAVAQKLAETIHKTVNENSRQAWENLLTFSYHTLHVTRDPQNNASLTSRVKKNCVTEIELNQHFSLGSSTKNNIVKHVEDKISEGDIKGAARLLFSSDTIAPNSPETVLALQNKHPHQLSSQPFSDAHDVAPPLQTSVDSVRGAIMSFPPGSAGGLDGITPQHLKDLTSGCCGDAGEKLLQEVTNLCNLMLRGDVASDIVDILYGANLCALRKRDGGIRPIAVGSTYRRLTAKIACRSINSLSSYFQPKQLGFACKGSCEAAVHSFRTHIQNSKNTVYLKVDVKNAFNSVDRVAMLTQIKTKAPTILPFMLQCYREPTKLIYQNHLIQSEVGCQQGDPLGPAIFSLAIHPVIELLNSKFNVWYLDDGTLASDASTVLSDFQTLIHEFKIIGLDLNLGKCELFVPDDCEDRDGIVSSFKAVAPELSVIEKSSLFLLGSPILADSFPDYIKEKVQNFSESLDRLLQINSHMAFTLIRYCLFVPKLTYVLRCCQLWKFPQLLHSLDDTLKHTLSTILNINFDERSWTQATLPVRFGGLGVRKISDIALPAFLSSFHANRAVIAKILEPSSCPLVIPFADEAKDAWNIASAGSRVPENTSSQRLWDGPVCELVRNKLFNTSTSVAERARLLAVERWESGAWLRALPSKNIGTLLDRNTFRLATALRLGAPHVVPHQCVCGAHVDSYGHHGLCCSRSAGRFTRHHNLNDLIRRALVTAGVPAILEPSGLARDDGKRPDGMTLVPWNMGRALVWDATCVDTLASSHVQGTSSCAGAAANQAENLKRRKYENLSGDLIFEPFGVETLGAWGPGAHKLFREISKRLTEATRDPRAGSYLAQRIAIAIQRGNAVSLLGTLPDGDDMGKFFFL

SEQ ID NO: 33297 - protein, 951 aa, Glaucopsyche alexis
MTRSQDAGSSTDITTVSLGNLQQCSHCSRYFKSQRGLNIHVGKCHKQLPTLIPPITTSLPNPIYQTSFWQKISKFKRFVPVLKRIPRGARVTVAQKLAETIRHTVLENSRQAWENLLTFPYRFLHVTRDPLNNASLTSRIKKNCVSDIDLNPNFSLHSSAKFNLVKSVENKISEGDIKGAARLLFSNDTVAPDCPETLIALQNKHPSQSNPFTASDDAFPPLQTSADKVRGAIMSFLPGSAGGLDGLTPQHLKDLTSGCCGEAGEKLLNELTNLCNLMLRGGVASDIVDILYGANLCALKKRDGGIRPIAVGSTYRRLTAKLACKSVTSLASYFQPKQLGYACKGGCEAAVHSFRTAIHNQGDDVFLKVDVKNAFNSVERGAMLAQIKSKAPAILPFILQCYNDPTKLIYKDHLISSEVGCQQGDPLGPAIFSLAIHPVIELLNSKFNVWYLDDGTIGSDAPTVLSDFQTLIREFQKIGLELNLGKCELFVPDSCEDRNAIISSFKEIAPQLSVIDKDSLFLLGSPILDESLPEFINNKLQNFSETLDRLLQINCHMAFTLIRYCVFVPKFTYVLRCCQLWKFPQLLKQLDDTIRHTLSTILNINFDDRSWTQATLPVRFGGLGVRKPSDISLPAYLSSVHANHRLIFKILEHQSYSIIVPFLDEAKDVWSATSACSELPDNVFSQRLWDEPLCRLVRNNLLNTSSSPVEQARLLAAEKWESGLWLQALPSPNTGTLLDRTAFRIATALRLGTPHVVPHRCVCGANVDSLGHHGLSCQRSAGRISRHHCLNDLIRRALVTAGVPAVLEPSGLARDDGKRPDGMTLVPWRVGRALVWDATCVDTLAPSHVQGTSSTAGAAANQAENFKRRKYENLSGDLIFEPFGVETLGSWGPGAHKLFREISKKLIEATRDPRAGTYLAQRVSIAIQRGNSLSLLGTLPGGDDLGDFFLL

SEQ ID NO: 33298 - protein, 951 aa, Cecropterus casica
MQGSTFDVILSLENLVQCSQCPQPRYFRSERGLRIHTGKCHKQPLLASPSEASVPPSQNPTTREPFWQTISKLRQSVPVLRRIPRGARVAVAQKLAETIHKTVNENSRQAWENLLTFPYRTLHVTRDPQNNASLTSRVKNNCITENDLYQHFPLRFSNKSNIAKNVENKISEGDIKGAARLLFSSDTIAPNSPETVSALQNKHPHQLTSQPFCDAHDVAPPLQASVDSVRGAIMSFPPGSAGGLDGITPQHLKDLTSGCCGDAGEKLLQEVTNLCNLMLRGEVASDIVDILYGANLCALRKRDGGIRLIAVGSTYRRLTAKIACRSINSLSSYFQPKQLGFVCKGGCEAAVHSFRTHIQNSKNNVYLKVDVKNAFNSVDRVAMLTQIKTKAPTILPFMLQCYQEPTKLIYRNHLIQSEVGCQQGDPLGPAIFSLAIHPVIELLNSKFNVWYLDDGTLASDASTVLSDFQTLIREFKIIGLDLNLGKCELFVPDDCEDRDEIISSFKTVAPELSVIEKSSLFLLGSPILADSFPDYINEKIQNFSESLDRLLQINSHMAFTLIRHCLFVPKFTYVLRCCQLWKFPQLLHSLDNTLKHTLSTILNIKFDERSWTQATLPVRFGGLGIRKTSDVALPAFLSSVHASRELITQILEPSSCPLVIPFADEAKDAWDIASAGSGVPKNSSSQRLWDGPVCELVRNKLLNTSTSVTERARLLAVERWESGAWLQALPSKNTGTLLDRNTFRLATALRLGAPHVVPHQCVCGAHVDSYGHHGLCCSRSAGRFSRHHSLNDLIRRALVTAGVPAILEPSGLARDDGKRPDGMTLVPWNVGRALVWDATCVDTLASSHVQGTSSCAGAAANQAENLKRRKYENLSGDLIFEPFGVETLGTWGPGAHKLFREISKKLTEATRDPRAGSYLAQRIAIAIQRGNAVSLLGTLPDGDDLGKIFFL

SEQ ID NO: 33299 - protein, 951 aa, Glaucopsyche alexis
MTRSQDAGTSTDITTVSLGNLQQCSHCSRYFKSQRGLNIHVGKCHKQLPTLIPPITTSLPNPIYQTSFWQKISKFKRFVPVLKRIPRGARVTVAQKLAETIRHTVQENSRQAWENLLTFPYRFLHVTRDLLNNASLTSRIKKNCVSDIDLNPNFSLHSSAKFNLVKSVENKISEGDIKGAARLLFSNDTVAPDCPETLIALQNKHPSQSNPFTASDDALPPLQTSADKVRGAIMTFLPGSAGGLDGLTPQHLKDLTSGCCGEAGEKLLNELTNLCNLMLRGGVASDIVDILYGANLCALKKRDGGFRPIAVGSTYRRLTAKLACKSITSLASYFQPKQLGFACKGGCEAAVHSFRTAIHNQGDDVFLKVDVKNAFNSVERGAMLAQIKSKAPAILPFILQCYNVPTKLIYKDHLISSEVGCQQGDLLGPAIFSLAIHPVIELLNSKFNVWYLDDGTIGSDAPTVLSDFQTLIREFQKIGLELNLGKCELFVPDSCEDRNAIISSFKEIAPQLSVIDKDSLFLLGSPILDESLPEFINNKLQNFSETLDRLLQINCHMAFTLIRYCVFVPKFTYVLRCCQLWKFPQLLKQLDDTIRHTLSTILNISFDDRSWTQATLPVRFGGLGVRKPSDISLPAYLSSVHANHRLIFKILEHQSYSIIVPFLDEAKDVWSATSACSELPDNVFSQRLWDEPLCRLVRNNLLNTSSSPVEQARLLAAEKWESGLWLQALPSPNTGTLLDRTAFRIATSLRLGTSHVVPHRCVCGENVDSLGHHGLSCQRSAGRISRHHCLNDLIRRALVTAGVPAVLEPSGLARDDGKRPDGMTLVPWRVGRALVWDATCVDTLAPSHVQGTSSTAGAAANQAENFKRRKYENLSGDLIFEPFGVETLGSWGPGAHKLFREISKKLIEATRDPRAGAYLAQRVSIAIQRGNSLSLLGTLPGGDDLGDFFLL

SEQ ID NO: 33300 - protein, 952 aa, Celastrina argiolus
MLSSQDAGTETDISTVSLGNLVQCSFCPQARYFKSQRGLNIHVGKCHKQLSSVTPPLPNAAYPTDFWHELSKFKCSLPVVKRIPRGARVPVAQKLAETVRKTVLENSRQAWEKLLTFPYRILHVNRDPLNNASLTSRIKKNCFSDTDLNIHFSSYSSTPKYNVVKTVENKLSMGDVKGAARLLFSSDTVAPDCPETVVALQNKHPTQISPNPPASADDTIPPLQTSADKVRGAIMSFLPGSAGGLDGLTSQHLKDLTSCFCGETGEKLLHELTNLCNLMLRGEVVTDIVDILYGANLCALKKRDGGIRPIAVGSTYRRLTAKLACKSLTFLASYFQPKQLGFACKGGCEAAVHSFRTAIHNQSGDVFLKVDVKNAFNSVDRVAMLAQIKLKAPAILPFMLQCYNDPTKLIYQNHLISSEVGCQQGDPLGPAIFSLAIQPVVELLNSKFNVWYLDDGTLGSDAHTVLSDFQNLIHELKKIGLELNLGKCELFVPDNCQDRDAIISRFKDVAPQLSIIDKGSLLLLGSPILDESLPVFIDNKLQNFCDTLDRLLQINCHMAFTIVRYCLFVPKFTYVLRCCQLWKFPELLKRLDDTLKHTLSSILNISFNHRSWTQATLPVRFGGLGIRKASDIALPAFLSSVHFNHTVISKILERSNYPLTIPFADEAKNAWDIVSAGSIVPENTSSQRLWDEPICRLVRNCLFNTSSSPAERARLLAVERWESGVWLQALPSANIGTLLDRSTFQLATALRLGAPHVVPHQCVCGANVDSYGHHGLCCTRSAGRISRHHSLNDLIRRALVTAGVPAILEPSGLARDDGKRPDGMTLVPWSVGRALVWDATCVDTLAPSHVQATSSCAGAAAYQAENLKRRKYETLGGDIIFEPFGVETLGSWGPGAHKLFKALSKKLMELTQDPRAGTYLAQRIAIAIQRGNAVSLLGTLPEGDDLVAFFYL

SEQ ID NO: 33301 - protein, 951 aa, Glaucopsyche alexis
MTRSQDAGTSTDITTVSLGNLQQCSHCSRYFKSQRGLNIHVGKCHKQLPTLIPLITTSLPNPIYQTSFWQKISKFKRFVPVLKRIPRGARVTVAQKLAETIRHTVLENSRQAWENLLTFPYRFLHVTRDPLNNASLSSRIKKNCVSDIDLNPNFSLHSSAKFNLVKSVENKISEGDIKGAARLLFSNDTVAPDCPETLIALQNKHPSQSNPFTASDEALPPLQTSADKVRGAIMSFLPGSAGGLDGLTPQHLKDLTSGCCGEAGEKLLNELTNLCNLMLRGGVASDIVDILYGANLCALKKRDGGIRPIAVGSTYRRLTAKLACKSITSLASYFQPKQLGFVCKGGCEAAVHSFRTAIHNQGDDVFLKVDVKNAFNSVERGAMLAQIKSKAPAILPFILQCYNDPTKLIYKDHLISSEVGCQQGDPLGPAIFSLAIHPVIELLNSKFNVWYLDDGTIGSDAPTVLSDFQTLIREFQKIGLELNLGKCELFVPDSCEDRNAIISSFKEIAPQLSVIDKDSLFLLGSPILDESLPEFINNKLQNFSETLDRLLQINCHMAFTLIRYCVFVPKFTYVLRCCQLWKFPQLLKQLDDTIRHTLSTILNISFDDRSWTQATLPVRFGGLGVRKPSDISLPAYLSSVHANHRLIFKILEHQSYSIIVPFLDEAKDVWSATSACSELPDNVFSQRLWDEPLCRLVRNNLLNTSSSPVEQARLLAAEKWESGLWLQALPSPNTGTLLDRTAFRIATSLRLGTSHVVPHRCVCGANVDSLGHHGLSCQRSAGRISRHHCLNDLIRRALVTAGIPAVLEPSGLARDDGKRPDGMTLVPWRVGRALVWDATCVDTLAPSHVQGTSSTAGAAANQAENFKRRKYENLSGDLIFEPFGVETLGSWGPGAHKLFREISKKLIEATRDPRAGTYLAQRVSIVIQRGNSLSLLSTLPGGDDLGDFFLL

SEQ ID NO: 33302 - protein, 952 aa, Celastrina argiolus
MLSSQDAGTETDISTVSLGNLVQCSFCPQARYFKSQRGLNIHVGKCHKQLSSVTPPLPNAAYPTDFWHELSKFKCSLPVVKRIPRGARVPVAQKLAETVRKTVLENSRQAWEKLLTFPYRILHVNRDPLNNASLTSRIKKNCFSDTDLNIHFSSYSSTPKYNVVKTVENKLSMGDVKGAARLLFSSDTVAPNCPETLVALQNKHPTQISPNPPASADDTIPPLQTSADKVRGAIMSFLPGSAGGLDGLTSQHLKDLTSCCCGETGEKLLHELTNLCNLMLRGEVVTDIVDILYGANLCALKKRDGGIRPIAVGSTYRRLTAKLACKSLTFLASYFQPKQLGFACKGGCEAAVHSFRTAIHNQSGDVFLKVDVKNAFNSVDRVAMLAQIKLKAPAILPFMLQCYNDPTKLIYQNHLISSEVGCQQGDPLGPAIFSLAIQPVVELLNSKFNVWYLDDGTLGSDAHTVLSDFQNLIHELKKIGLELNLGKCELFVPDNCQDRDAIISRFKDVAPQLSIIGKGSLLLLGSPILDESLPVFIDNKLQNFCDTLDRLLQINCHMAFTIVRYCLFVPKFTYVLRCCQLWKFPELLKRLDDTLKHTLSSILNISFDHRSWTQATLPVRFGGLGIRKASDIALPAFLSSVHFNHTVISKILERSNYPLTIPFADEAKNAWDIVSAGSIVPENTSSQRLWDEPICRLVRNCLFNTSSSPAERARLLAVERWESGVWLQALPSANIGTLLDRSTFQLATALRLGAPHVVPHQCVCGANVDSYGHHGLCCTRSAGRISRHHSLNDLIRRALVTAGVPAILEPSGLARDDGKRPDGMTLVPWSVGRALVWDATCVDTLAPSHVQATSSCAGAAAYQAENLKRRKYETLGGDIIFEPFGVETLGSWGPGAHKLFKALSKKLMELTQDPRAGTYLAQRIAIAIQRGNAVSLLGTLPEGDDLAAFFYL

SEQ ID NO: 33303 - protein, 789 aa, Celastrina argiolus
MKNVENKISEGDIKGAARLLFSNDTIAPDCPETFIALQNKHPSQLTPNHFTDIANTTSPLQTSTDKVRGAIMSFLPGSAGGLDGLTPQHLKDLTSGCCGEAGEKLLHELTNLCNLMLRGEVASDIVDILYGANLCALKKRDGGIRPIAVGCTYRRLTAKLACKSVTSLASYFQPIQLGFACRGGCEAAVHSFRTAVQNQDDNVFLKVDVKNAFNSVDRATMLARIKSKAPAILPFMLQCYNDPTKLIYKNHLIQSEVGCQQGDPLGPAIFSLAIHPVIEQLNSKFNIWYLDDGTLGSDATTVLSDFNTLIREFKNIGLELNLGKCELFVPDSCGNRNDIISSFQKIAPQISVIDKDSLFLLGSPILNESLPVFVKNKLQNFSESLDRLLQINCHMAFTLIRYCLFVPKFTYVLRCCQLWKFPELLKQLDDTVRHTLSTILNINFNDRSWTQATLPVRFGGLGVRKPSNISLPAFLSSIHANRNLISQILQNTSLSNRVPFLDEAKDAWLASSACSELPVNTSSQKLWDEPLCRLTRNNLLNTSSSPADQARLLAAEKWESGLWLQVLPSPNTGTLLDKTTFRLATSLRLGIPHVVPHSCVCGAHVDSLGHHGLSCRRSAGRISRHHSLNDLIRRALATAGVPAVLEPAGLARDDGKRPDGMTLVPWRVGRALVWDATCVDTLAPSHVQGTSSVAGAAANQAENLKRRKYENLSGDLIFEPFGVETLGPWGPGAHKLFGQISKNLVEATRDPRAGTYLAQRVSIAIQRGNSLSLLGTLPEGDDLGVIFYL

SEQ ID NO: 33304 - protein, 951 aa, Glaucopsyche alexis
MIRSQDAGSSTDITTVSLGNLQQCSHCSRYFKSQRGLNIHVGKCHKQLPTLIPPITTSLPNPIYQTSFWQKISKFKRFVPVLKRIPRGARVTVAQKLAETIRHTVLENSRQAWENLFTFPYRFLHVTRDPLNNASLTSRIKKNCVSDIDLNPNFSLHSSAKFNLVKSVENKISEGDIKGAARLLFSNDTVAPDCPETLIALQNKHPSQSNPFTASDDAFPPLQTSADKVRGAIMSFLPGSAGGLDGLTPQHLKDLTSGCCGKAGEKLLNELTNLCNLMLRGGVASDIVDILYGANLCALKKRDGGIRPIAVGSTYRRLTAKLACKSVTSLASYFQPKQLGFACKGGCEAAVHSFRTAIHNQGDDVFLKVDVKNAFNSVERGAMLAQIKSKAPAILPFILQCYNDPTKLIYKDHLISSEVGCQQGDPLGPAIFSLAIHPVIELLNSKFNVWYLDDGTIGSDAPTVLSDFQTLIREFQKIGLELNLGKCELFVPDSCEDRNAIISSFKEIAPQLSVIDKDSLFLLGSPILDESLPEFINNKLQNFSATLDRLLQINCHMAFTLIRYCVFVPKFTYVLWCCQLWKFPQLLKQLDDTIRHTLSTILNINFDDRSWTQATLPVRFGGLGVRKPSDISLPAYLSSVHANHRLIFKILEHQSYSIIVPFLDEAKDVWSATSACSELPDNVFSQRLWDEPLCRLVRNNLLNTSSSPVEQARLLAAEKWESGLWLQALPSPNTGTLLDRTAFRIATSLRLGTPHVVPHRCVCGANVDSLGHHGLSCQRSAGRISRHHCLNDLIRRALVTAGVPAVLEPSGLARDDGKRPDGMTLVPWRVGRALVWDATCVDTLAPSHVQGTSSTAGAAANQAENFKRRKYENLSGDLIFEPFGVETLGSWGPGAHKLFREISKKLIEATRDPRAGTYLAQRVSIAIQRGNSLSLLGTLPGGDDLGDFFLL

SEQ ID NO: 33305 - protein, 957 aa, Cyaniris semiargus
MLSTSQDAGTSTDDAIVPLEILVQCTQCPQPRYFRSERGLRIHIGKCHKESLLSSPSEASVSPSQSSTAREPFWQTISKLKQSVPVLRRIPRGARVAVAQKLAETIHKTVNENSRHAWENLLTFPYHTLHVIRDPQNNTSLTSRVKKNCATDIDLNQNFPLCSSAKNNIVKNVENKISEGDIKGAARLLFSSDTIAPNSPETVSALQKKHPHQLTSQNISDAHDAPPLQTTVDSVRGAIMSFPPGSAGGLDGITPQHLKDLTSGCCGDAGEKLLQEVTNLCNLMLRGEVASDIVDILYGANLCALRKRDGGIRPIAVGSTYRRLTAKIACRSIKSLSSYFQPKQLGFACKGGCEAAVHSFRTHIQNSKNSIYLKVDVRNAFNSIDRVAMLTQIKTKAPTILPFMLQCYREPTKLIYQNHLIQSEVGCQQGDPLGPAIFSLAIHPVIELLNSKFNVWYLDDGTLAGDASTVLSDFQTLIREFKIIGLDLNLGKCELFVPDDCEDRDEIISSVKAVAPELSVIEKSSLFLLGSPVLADSFPDYINEKARNFSESLDRLLQINSHMAFTLIRYCLFVPKFTYVLRCCQLWKFPELLHSLDDTLKHTLSTILNIKFDERSWTQATLPVRFGGLGIRKTSDTALPAFLSSVHANRAVIAKILESSSFPFVIPFADEAKDAWDIASAGSEVPKNTSSQRLWDEPVCELVRNKLFNTSTSAVERARLLAVERWESGAWLQALPSKNTGTLLDRNTFRLATALRLGAPHVVPHQCVCGAHVGSYGHHGLCCSRSAGRFSRHHSLNDLIRRALVTAGVPAILEPSGLARDDGKRPDGMTLVPWSVGRALVWDATCVDTLASSHIQGTSSCAGAAANQAENLKRRKYENLSGDLIFEPFGVETLGAWGPGAHKLFRGISKKLVEATRDPRAGSYLAQRIAIAIQRGNAVSLLGTLPGGVDLGKFFFL

SEQ ID NO: 33306 - protein, 951 aa, Glaucopsyche alexis
MTRSQDAGTSTDITTVSLGNLQQCSHCSRYFKSQRGLNIHVGKCHKQLPTLIPPITTSLPNPIYQTSFWQKISKFKRFVPVLKRIPRGARVTVAQKLAETIRHTVLENSRQAWENLLIFPYRFLHVTRDPLNNASLTSRIKMNCVSDIDLNPNFSLHSSANFNLVKSVENKISEGDIKGAARLLFSNDTVAPDCSETLIALQNKHPSQSNPFTASDDAFLPLQTSADKVRGAIMSFLPGSAGGLDGLTPQHLKDLTSGCCGEAGEKLLNELTNLCNLMLRGGVASDIVDILYGANLCALKKRDGGIRQIAVGSTYRRLTAKLACKSVTSLASYFQPKQLGFACKGGCEAAVHSFRTAIHNQGDDVFLKVDVKNAFNSVERGAMLAQIKSKAPAILPFILQCYNDPTKLIYKDHLISSEVGCQQGDPLGPAIFSLAIHPVIELLNSKFNVWYLDDGTIGSDAPTVLSDFQTLIREFQKIGLELNLGKCELFVPDSCENRNAIISSFKEIAPQLSVIDKDSLFLLGSPILDEFLPEFINNKLQNFSETLDRLLQINCHMAFTLIRYCVFVPKFTYVLRCCQLWKFPQLLKQLDDTIRHTLSTILNINFDDRSWTQATLPVRFGGLGVRKPSDISLPAYLSSVHANHRLIFKILEHQSYSIIVPFLDEAKDVWSATSACSELPDNVFSQRLWDEPLCRLVRNNLLNTSSSPVEQARLLATEKWESGLWLQALPSPNTGTLLDRTAFRIATSLRLGTPHVVPHRCVCGANVDSLGHHGLFCQRSAGRISRHHCLNDLIRRALVTAGVPAVLEPSGLARDDGKRPDGMTLVPWRVGRALVWDATCVDTLAPSHVQGTSSTAGAAANQAENFKRRKYENLSGDLIFEPFGVETLGSWGPGAHKLFREISKKLIEATRDPRAGTYLAQRVSIAIQRGNSLSLLGTLPGGDDLGDFFLL

SEQ ID NO: 33307 - protein, 957 aa, Lysandra bellargus
MLSNSQDAGTSSDDAILPLESLVHCSQCPRPRCFKSEKGLRIHIGKCHKQTVLPSPSEASVPPSQNSARKPFWKTISNLKQSVPVVRRIPRGARVAVAQKLAESIRQMVNDNSRQAWEKLLTFPYRTLHVIRNPQNNASLTSRVKKNCTTEIDLTQHFSLGPSTKNNIVKNVENKISEADIKGAARLLFSSDTIAPNSPETVLALQNEHPQQLTSQPFSDAHDVAPPFQTTVDSVRGAIMSFPPGSAGGLDGITPQHLKDLTSGCCGDAGEKLLQEVTNLCNLMLRGEVASDIVDILYGANLCALRKRDGGICPIAAGSIYRRLTAKIACRSMNSLSSYFQPKQLGFACKGGCEAAVHSFRTHIQNSKNTVYLKVDVKNAFNSVDRVAMLTQIKTKAPTILPFMLQCYQEPTKLIYWNHLIQSEVGCQQSDPLGPAIFSLAIHPVIELLNSKFNVWYLDDGTLASDPSTVLSDFQTLIREFKIIGLDLNLEKCELFVPDDSENRYEIISNFNAVAPELSVTEKSSLCLLGSPILADSFPDYINEKIQNFTESLDRLLQINSHMAFTLIRHCLFVPKFTYVLRCCQLWKFPQLLHSVDDTLKHTLSTILNIKFDERSWTQATLPVRFGGLGIRKTFDVALPAFLSSVHANRQVIVKILEPSSCPLDIPFADEAKDAWDIASAGSEVPVNTSSQRLWDGPVCELVRNKLLNTSTSVAERARLLALERWELGAWLQALPSKNTGTLLDRNTFRLATALRLGAPHVIPHQCVCGTHVDSYGHHGLCCSRSAGRFSRHHSLNDLIRRALVTAGVPAILEPSGLVRDDGKRPDGMTLVPWNVGRALVWDATCVDTLAPSHVQGTSSCAGAAANQAENLKRRKYENLGGDLIFEPFGVETLGAWGPGAHKLFSEISKRLIEATRDPRAGSYLAQRIAIAIQRGNAVSLLGTLPDGDDLGKFFFL

SEQ ID NO: 33308 - protein, 718 aa, Cyaniris semiargus
MSFPPGSAGGLDGITPQHLKDLTSGCCGDAGEKLLQEVTNLCNLMLRGEVASDIVDILYGANLCALRKRDGGIRPIAVGSTYRRLTAKIACRSIKSLSSYFQPKQLGFACKGGCEAAVHSFRTHIQNSKNSIYLKVDVRNAFNSIDRVAMLTQIKTKAPTILPFMLQCYREPTKLIYQNHLIQSEVGCQQGDPLGPAIFSLAIHPVIELLNSKFNVWYLDDGTLAGDASTVLSDFQTLIREFKIIGLDLNLGKCELFVPDDCEDRDEIISSVKAVAPELSVIEKSSLFLLGSPVLADSFPDYINEKARNFSESLDRLLQINSHMAFTLIRYCLFVPKFTYVLRCCQLWKFPELLHSLDDTLKHTLSTILNIKFDERSWTQATLPVRFGGLGIRKTSDTALPAFLSSVHANRAVIAKILESSSFPFVIPFADEAKDAWDIASAGSEVPKNTSSQRLWDEPVCELVRNKLFNTSTSAVERARLLAVERWESGAWLQALPSKNTGTLLDRNTFRLATALRLGAPHVVPHQCVCGAHVGSYGHHGLCCSRSAGRFSRHHSLNDLIRRALVTAGVPAILEPSGLARDDGKRPDGMTLVPWSVGRALVWDATCVDTLASSHIQGTSSCAGAAANQAENLKRRKYENLSGDLIFEPFGVETLGAWGPGAHKLFRGISKKLVEATRDPRAGSYLAQRIAIAIQRGNAVSLLGTLPDGVDLGKFFFL

SEQ ID NO: 33309 - protein, 957 aa, Lysandra coridon
MLSNSQDAGTSSDDAVLPLESLVHCSQCPQLRCFRSERGLRIHIGKCHKQTVLPSPSEASVPPSQNSAREPFWKTISNLKQSVPVLRRIPRGARVAVAQKRVESIRQTVNDNSRQAWEKLLTFPYRTLHVIRDPQNNASLTSCVKKNCTTEIDLTQHFSLDPSTKNNIVKNVENKISEGDIKGAARLLFSSDTIAPNSPETVLALQNKHPQQLTSQPFSDAHDVAPPFQTTVDSVRGAVMSFPPGSAGGLDGITPQHLKDLTSGCCGDAGDKLLQEVTNLCNLMLRGEVASDIVDILYGANLCALRKRDGGIRPIAVGSTYRCFTAKIACRSMNSLSSYFQPKQLGFACKGGCEAAVHSFRTHIQNSKNTVYLKVDVKNAFNSVDRVVMLTQIKTKAPTILPFMLQCYQEPTKLIYRNHLIKSEVGCQQGDPLGPAIFSLAIHPVIELLNSKFNVWYLDDGTLASDPSTVLSDFQTLIREFKIIGLDLNLGKCELFVPDDCENRNEIISNFKAVAPELSVTKKSSLFLLGSPILADSFPDYINEKIQNFSESLDRLLQINSHMAFTLIRHCLFVPKFTYVLRCCQLWKFPQLLHSLDDTLKHTLSTILNIKFDERSWTQATLPVRFGGLGIRKTFDVALPAFLSSVHANRQVIAKILEPSSCPLDIPFADEAKDAWDIASAGSEVAVNTSSQRLWDGPICELVRNKLLNTSTSIAERARLLAVERWESGAWLQALPSKNTGTLLDRNTFRLATALRLGAPHVVPHQCVCGTHVDSYGHHGLCCSRSAGRFSRNHSLNDLIRRALVTAGVPAILEPSGLVRDDGKRPDGMTLVPWNVGRSLVWDATCVDTLAPSHVQGTSSCAGAAANQAENLKRRKYENLGGDLIFEPFGVETLGAWGPGAHKLFSEISKRLIEATRDPRAGSYLAQRIAIAIQRGNAVSLLGTLPDGDDLGKFFFL

SEQ ID NO: 33310 - protein, 953 aa, Celastrina argiolus
MLSSQDAGTETDISTVSLGNLVQCSFCPQARYFKSQRGLKIHVGKCHKQLSSVTPPLPNAAAYQTDFWHELSKFKCSLPVVKRIPRGARVPVAQKLAETVRKTVLENSRQAWEKLLTFPYRILHVNRDPLNNASLTSRIKKNCFSDTDLNINFSSYSSTPKYNVVKTVENKLSMGDVKGAARLLFSSDTVAPDCPETLVALQNKHPTQISPNPPASADDTIPPLQTSADKVRGAIMSFLPGSAGGLDGLTSQHLKDLTSCCCGETGEKLLHELTNLCNLLLRGEVVTDIVDILYGANLCALKKRDGGIRPIAVGSTYRRLTAKLACKSLTFLASYFQPKQLGFACKGGCEAAVHSFRTAIHNQSGDVFLKVDVKNAFNSVDRVAMLAQIKLKAPAILPFMLQCYNDPTKLIYQNHLISSEVGCQQGDPLGPAIFSLAIQPVVELLNSKFYVWYLDDGTLGSDAHTVLSDFQNLIHELKKIGLELNLGKCELFVPDNCQDRDAIISRFKDVAPQLSIIDKGSLLLLGSPILDESLPDFIDNKLQNFCDTLDRLLQINCHMAFTIVRYCLFVPKFTYVLRCCQLWKFPELLKRLDDTLKHTLSSILNISFDHRSWTQATLPVRFGGLGIRKASDIALPAFLSSVHFNHTVISKILERSNYPLTIPFADEAKNAWDIVSAGSIVPENTSSQRLWDEPICRLVRNCLFNTSSSPAERARLLAVERWESGVWLQALPSANIGTLLDRSTFQLATALRLGAPHVVPHQCVCGANVDSYGHHGLCCTRSAGRISRHHSLNDLIRRALVTAGVPAILEPSGLARDDGKRPDGMTLVPWSVGRALVWDATCVDTLAPSHVQATSSCAGAAAYQAENLKRRKYETLGGDIIFEPFGVETLGSWGPGAHKLFKALSKKLMELTQDPRAGTYLAQRTAIAIQRGNAVSLLGTLPEGDDLAAFFYL

SEQ ID NO: 33311 - protein, 951 aa, Glaucopsyche alexis
MTRSQDAGTSTDITTVSLGNLQQCSHCSRYFKSQRGLNIHVGKCHKQLPTLIPLITTSLPNPIYQTSFWQKISKFKRFVPVLKRIPRGARVTVAQKLAETIRHTVLENSRQAWENLLTFPYRFLHVTRDPLNNASLTSRIKKNCVSDIDLNPNFSLHSSAKFNLVKSVENKISEGDIKGAARLLFSNDTVAPDCPETLIALQNKHPSQSNPFTASDDALPPLQTSADKVRGAIMSFLPGSAGGLDGLTPQHLKDLTSGCCGEAGEKLLNELTNLCNLMLRGGVASDIVDILYGANLCALKKRDGGIRPIAVGSTYRRLTAKLACKSITSLASYFQPKQLGFACKGGCEAAVHSFRTAIHNQGDDVLLKVDVKNAFNSVERGAMLAQIKSKAPAILPFILQYYNDPTKLIYKDHLISSEVGCQQGDPLGPAIFSLAIHPVIELLNSKFNVWYLDDGTIGSDAPTVLSDFQSLIREFQKIGLELNLGKCELFVPDSCEDRNAIISSFKEIAPQLSVIDKDSLFLLGSPILYESLPEFINNKLQKFSETLDRLLQINCHMAFTLIRYCVFVPKFTYVLRCCQLWKFPQLLKQLDDTIRHTLSTILNISFDDRSWTQATLPVRFGGLGVRKPSDISLPAYLSSVHANHRLIFKILEHQSYSIIVPFLDEAKDVWSATSACSELPGNVFSQRLWDEPLCRLVRNNLLNTSSSPVEQARLLAAEKWESGLWLQALPSPNTGTLLDRTAFRIATSLRLGTSHVVPHRCVCGANVDSLGHHGLSCQRSAGRISRHHCLNDLIRRALVTAGVPAVLEPSGLARDDGKRPDGMTLVPWRVGRALVWDATCVDTLAPSHVQGTSSTAGAAANQAENFKRRKYENLSGDLIFAPFGVETLGSWGPGAHKLFREISKKLIEATRDPRAGTYLAQRVSIAIQRGNSLSLLGTLPGGDDLGDFFLL

SEQ ID NO: 33312 - protein, 951 aa, Glaucopsyche alexis
MTRSQDAGTSTDITTVSLGNLQQCSHCSRYFKSQRGLNIHVGKCHKQLPTLIPLITTSLPNPIYQTSFWQKISKFKRFVPVLKRIPRGARVTVAQKLAETIRHTVLENSRQAWENLLTFPYRFLHVTRDPLNNASLTSRIKKNCVSDIDLNPNFSLHSSAKFNLVKSVENKISEGDIKGAARLLFSNDTVAPDCPETLIALQNKHPSQSNPFTASDDALPPLQTSADKVRRTIMSFLPGSAGGLDGLTPQHLKDLTSGCCGEAGEKLLNELTNLCNLMLRGGVASDIVDILYGANLCALKKRDGGIRPIAVGSTYRCLTAKLACKSITSLASYFQPKQLGFACKGGCEAAVHSFRTAIHNQGDDVFLKVDVKNAFNSVERGAMLAQIKSKAPAILPFILQCYNDPTKLIYKDHLISSEVGCQQGDPLGPAIFSLAIHPVIELLNSKFNVWYLDDGTIGSDAPTVLSDFQTLIREFQKIGLELNLGKCELFVPDSCEDRNAIISSFKEIAPQLSVIDKDSLFLLGSPILDESLPEFINNKLQNFSETLDRLLKINCHMAFTLIRYCVFVPKFTYVLRCCQLWKFPQLLKQLDDTIRHTLSTILNISFDDRSWTQATLPVRFGGLGVRKPSDISLPAYLSSVHANHRLIFKILEHQSYSIIVPFLDEAKDVWSATSACSELPDNVFSQRLWDEPLCRLVRNNLLNTSSSPVEQARLLAAEKWESGLWLQALPSPNTGTLLDRTAFRIATSLRLGTSHVVPHRCVCGANVDSLGHHGLSCQRSAGRISRHHCLNDLIRRALVTAGVPAVLEPSGLARDDGKRPDGMTPVPWRVGRALVWDATCVDTLAPSHVQGTSSTAGAAANQAENFKRRKYENLSGDLIFEPFGVETLGSWGPGAHKLFREISKKLIEATRDPRAGTYLGQRVSIAIQRGNSLSLLGTLPGGDDLGDFFLL

SEQ ID NO: 33313 - protein, 958 aa, Lysandra bellargus
MLRNSQDAGTSTDDAILPLENLVQCSQCPQPRYFRSERGLRIHIGKCHKQPLLSSPSETSVPPSQNSTAREPFWQTLSKLKHSVPVLRRIPRGARVAVAQKLAETIHKTVNENSRQAWVNLLTFSYHTLHVTRDPQNNASLTSRVKKNCVTEIELNQHFSLGSSTKNNIVKHVEDKISEGDIKGAARLLFSSDTIAPNSPETVLALQNKHPHQLSSQPFSDAHDVAPPFQTSVDSVRGAIMSFPPGSAGGLDGITPQHLKDLTSGCCGDAGEKLLQEVTNLCNLMLRGDVASDIVDILYGANLCALRKRDGGIRPIAVGSTYRRLTAKIACRSINSLSSYFQPKQLGFACKGGCEAAVHSFRTHIQNSKNTVYLKVDVKNAFNSVDRVAMLTQIKTKAPTILPFMLQCYREPTKLIYQNHLIQSEVGCQQGDPLGPAIFSLAIHPVIELLNSKFNVWYLDDGTLASDASTVLSDFQTLIHEFKIIGLDLNLGKCELFVPDDCEDRDGIVSSFKAVAPELSVIEKSSLFLLGSPILADSFPDYIKEKVQNFSESLDRLLQINSHMAFTLIRYCLFVPKLTYVLRCCQLWKFSQLLHSLDDTLKHTLSTILNINFDERSWTQATLPVRFGGLGVRKISDIALPAFLSSFHANRAVIAKILEPSSCPLVIPFADEAKDAWNIASAGSRVPENTSSQRLWDGPVCELVRNKLFNTSTSVAERARLLAVERWESGAWLRALPSKNIGTLLDRNTFRLATALRLGAPHVAPHQCVCGAHVDSYGHHGLCCSRSAGRFTRHHNLNDLIRRALVTAGVPAILEPSGLARDDGKRPDGMTLVPWNMGRALVWDATCVDTLASSHVQGTSSCAGAAANQAENLKRRKYENLSGDLIFEPFGVETLGAWGPGAHKVFREISKRLIEATRDPRAGSYLAQRIAIAIQRGNAVSLLGTLPDGDDMGKFFFL

SEQ ID NO: 33314 - protein, 952 aa, Celastrina argiolus
MLSSQDAGTETDISTVSLGNLVQCSFCPQARYFKSQRGLNIHVGKCHKQLSSVTPPLPNAAYPTDFWHELSKFKCSLPVVKRIPRGARVPVAQKLAETVRKTVLENSRQAWEKLLTFPYRILHVNRDPLNNASLTSRIKKNCFSDTDLNIHFSSYSSTPKYNVVKTVENKLSMGDVKGAARLLFSSDTVAPNCPETLVALQNKHPTQISPNPPASADDTIPPLQTSADKVRGAIMSFLPGSAGGLDGLTSQHLKDLTSCCCGETGEKLLHELTNLCNLMLRGEVVTDIVDILYGANLCALKKRDGGIRPIAVGSTYRRLTAKLACKSLTFLASYFQPKQLGFACKGGCEAAVHSFRTAIHNQSGDVFLKVDVKNAFNSVDRVAMLAQIKLKAPAILPFMLQCYNDPTKLIYQNHLISSEVGCQQGDPLGPAIFSLAIQPVVELLNSKFNVWYLDDGTLGSDAHTVLSDFQNLIHELKKIGLDLNLGKCELFVPDNCQDRDAIISRFKDVAPQLSIIDKGSLLLLGSPILDESLPDFIDNKLQNFCDTLDRLLQINCHMAFTIVRYCLFVPKFTYVLRCCQLWKFPELLKRLDDTLKHTLSSILNISFDHRSWTQATLPVRFGGLGIRKASDIALPAFLSSVHFNHTVISKILERSNYPLTIPFADEAKNAWDIVSAGSIVPENTSSQRLWDEPICRLVRNCLFNTSSSPAERARLLAVERWESGVWLQALPSANIGTLLDRSTFQLATALRLGAPHVVPHQCVCGANVDSYGHHGLCCTRSAGRISRHHSLNDLIRRALVTAGVPAILEPSGLARDDGKRPDGMTLVPWSVGRALVWDATCVDTLAPSHVQATSSCAGAAAYQAENLKRRKYETLGGDIIFEPFGVETLGSWGPGAHKLFKALSKKLMDLTQDPRAGTYLAQRIAIAIQRGNAVSLLGTLPEGDDLAAFFYL

SEQ ID NO: 33315 - protein, 966 aa, Bembecia ichneumoniformis
MLSRSQDAGTSTDNATVSSENLVQCLQCPQIRYFKSERGLRIHIGKCHKQRSVQTAILTPPHNSTPHQQPFWQEISTLKHSIPILKRIPKGARVAVAHNLAQAVHNTVRDNSRQAWEKLLSFPYRILHITRDPHNSASLTSRVKKNCNSNNDLNQYFSFSSSPKYNLFKSVENKISEGDIKGAARLLFSNDTIASNCSETLTALQNKHPRFQSSKFQLPPNFFQANDDVITPPLQTSAEKVRGAIISFPPGSAGGLDGLTPQHLKDLTSGCCGEAGETLLQELTSLCNLMLRGEVTSDIVDVLYGANLCALRKRDGGIRPIAVGSTYRRLTAKIACKSVNFLSSYFQPKQLGFACKGGCEAAVHSFRSAILNQGGDVFLKVDVKNAFNSVNRVAMLAQIKSKAPAILPFMIQCYNDPTKLLYKNHLISSEVGCQQGDPLGPAIFSLAIHPVIELLNSKFNVWYLDDGTLGGDASIVLSDFRTLILEFQKIGLDLNFAKCELFVTDNCVDRDAVISSFKEIAPQLSVIDKKSLHLLGSPILDESLPDFINSKLQNFSEILDRLLKINSHMAFSLIRYCLFVPKFTYVLRCCQLWKFPQLLSCLDNTIRHTLSSILNIRFDHRSWTQATLPIRFGGLGIRKTSDVSLPAFLSSTHANHALIYQILGRSSCSVPVPYTDEAKDAWRIACANSDIPVNTSSQRLWDEPLCRLLQNNLINTSSSPAEHARLLAVEKWESGLWLKALPSPNTGTLLDPTTFRLATALHLGAPHVIPHRCVCGTNVDSLGHHGLSCQRSAGRISRHHTLNDLIRRALVTAGVPAILEPSGLARDDGRRPDGMTLVPWKAGRPLVWDATCVDTLAPSHLQGTSNIAGAAANHAENLKRHKYENLSGDFIFVPFGVETLGTWGPGAHKLFREISKKLTETTRDPRAGNYLAQRISLTIQRGNALSLLGTLPDGDGLGLFLIYNLF

SEQ ID NO: 33316 - protein, 958 aa, Lysandra coridon
MLRNSQDAGTSTDDAILPLENLVQCSQCPQPRYFRSERGLRIHIGKCHKQPLLSSPSETSVPPSQNSTAREPFWQTLSKLKQSVPVLRRIPRGARVAVAQKLAETIHKTVNENSRQAWENLLTFSYHTLHVTRDPQNNASLTSRVKKNCVTEIELNQHFSLGPSTKNNIVKHVEDKISEGDIKGAARLLFSSDTIAPNSPETVLALQNKHPHQLSSQPFSDAHDFAPPLQTSVDSVRGAIMSFPPGSAGGLDGITPQHLKDLTSGCCGDAGEKLLQEVTNLCNLMLRGDVASDIVDILYGANLCALRKRDGGIRPIAVGSTYRRLTAKIACRSMNSLSSYFQPKQLGFACKGSCEAAVHSFRTHIQNSKNTVYLKVDVKNAFNSVDRVAMLTQIKTKAPTILPFMLQCYREPTKLIYQNHLIQSEVGCQQGDPLGPAIFSLAIHPVIELLNSKFNVWYLDDGTLASDASTVLSDFQTLIHEFKIIGLDLNLGKCELFVPDDCEDRDGIVSSFKAVAPELSVIEKSSLFLLGSPILADSFPDYIKEKVQNFSESLDRLLQINSHMAFTLIRYCLFVPKLTYVLRCCQLWKFPQLLHSLDDTLKHTLSTILNINFDERSWTQATLPVRFGGLGVRKISDIALPAFLSSFHANRAVIAKILEPSSCPLVIPFADEAKDAWNIASAGSRVPENTSSQRLWDGPVCELVRNKLFITSTSVAERARLLAVERWESGAWLRALPSKNIGTLLDRNTFRLATALRLGAPHVVPHQCVCGAHVDSYGHHGLCCSRSAGRFTRHHNLNDLIRRALVTAGVPAILEPSGLARDDGKRPDGMTLVPWNMGRALVWDATCVDTLASSHVQGTSSCAGAAANQAENLKRRKYENLSGDLIFEPFGVETLGAWGPGAHKVFREISKRLIEATRDPRAGSYLAQRIAIAIQRGNAVSLLGTLPDGDDMGKFFFL

SEQ ID NO: 33317 - protein, 956 aa, Glaucopsyche alexis
MLSSSQDVGTSTDDVTVPLENLVQCTQCPQPRYFKSERGLRIHIGKCHKLSLAPSPSVVLPSQNSTEHQPFWQEISKLKNSVPILRRIPRGARVAVAQKLAETVHKTVSENSRQAWEHLFTFPYRILHVTRDPRNNASLTSLVKKNCVSDSDLHPNFYSPSSAKNNIIKNVENKISEGDIKGAARLLFSNDTIAPNSPETLTALQNKHPPQLSPHLFLDTDDAEPALQTSVDSVRGAIMSFLPGSAGGLDGLTPQHLKDLTSGCCGEAGEKLLQEVTNLCNLMLRGGVASDIVDILYGANLCALRKRDGGIRPIAVGSTYRRLTAKIACRSINSLASYFQPKQLGFACKGGCEAAVHSFRTFFKNQNNSVFLKVDVKNAFNSVNRVAMLAQIKAKAPAILPFMLQCYKEPTKLIYKNHLIPSEVGCQQGDPLGPAIFSLAIHPAIELLNSKFNVWYLDDGTLGSDASTVLSDFRTLIHEFQNIGLELNFGKCELFVPDNCEDRETVISRFKEVAPQLSVIEKGSLLLLGSPILDDSLPDFINNKLQNFTETLDRLLQINCHMAFTLIRYCLFVPKFTYVLRCCQLWKFPQLLKRLDDTIKHTLSSILNIKFDHRSWTQATLPVRFGGLGIRQTSDVALPAFLSSVHANHAVILKILEYSSCPLVIPFADEAKDAWDIASAGSNVPENTFSQRLWDEPICRLVRNRLFNTSSSPVERARLLAVEKWESGVWLQALPSANTGTLLGRNTFRLATALRLGAPHVVPHQCVCGANVDSHGHHGLCCSRSAGRISRHHSLNDLIRRALVTAGVPAILEPSGLARDDGKRPDGMTLVPWSVGRVLVWDATCVDTLAPSHVQGTSNCAGAGANQAENLKRRKYENLSGDLIFEPFGVETLGAWGPGAHNFFKEISKKLTEATRDPRAGNYLAQRIAIAIQRGNAVSLLGTLPDGDDLGKFFYL

SEQ ID NO: 33318 - protein, 951 aa, Glaucopsyche alexis
MTRSQDAGTSTDITTVSLGNLQQCSHCSRYFKSQRGLNIHVGKCHKQLPTLIPPITTSLPNPIYQTSFWQKISKFKRFVPVLKRIPRGARVTVAQKLAETIRHTVLKNSRQAWENLLTFPYRFLHVTRDPLNNASLTSRIKKNCVSDIDLNPNFSLHSSAKFNLVKSVENKISEGDIKGAARLLFSNDTVAPDCPETLIALQNKHPSQSNPFTASDDAFPPLQTSADKVRGAIMSFLPGSAGGLDGLTPQHLKDLTSGCCGEAGEKLLNELTNLCNLLLRGGVASDIVDILYGANLCALKKRDGGIRPIAVGSTYRRLTAKLACKSVTSLASYFQPKQLGFACKGGCEAAVHSFRTAIHNQGDDVFLKVDVKNAFSSVERGAMLAQIKSKAPAILPFILQFYNDPTKLIYKDHLISSEVGCQQGDPLGPAIFSLAIHPVIELLNSKFNVWYLDDGTIRSDAPTVLSDFQTLIREFQKIGLELNLGKCELFVPDSCEDRNAIISSFKEIAPQLSVIDKDSLFLLGSPILDESLPEFINNKLQNFSETLDRLLQINCHMAFTLIRYCVFVPKFTYVLRCCQLWKFPQLLKQLDDTIRHTLSTILNINFDDRSWTQPTLPVRFGGLGVRKPSDISLPAYLSSVNANHRLIFKILEHQSYSIIVPFLDEAKDVWSATSACSELPDNVFSQRLWDEPLCRLVRNNLLNTSSSPVEQARLLAAEKWESGLWLQALPSPNTGTLLDRTAFRIATSLRLGTPHVVPHRCVCGANVDSLGHHGLSCQRSAGRISRHHCLNDLIRRALVTAGVPAVLEPSGLARDDGKRPDGMTLVPWRVGRALVWDATCVDTLAPSHVQGTSSTAGAAANQVENFKRRKYENLSGDLIFEPFGVETLGSWGPGAHKLFREISKKLIEATRDPRAGTYLAQRVSIAIQRGNSLSLLGTLPGGDDLGDFFLL

SEQ ID NO: 33319 - protein, 958 aa, Lysandra coridon
MLRNSQDAGTSTDDAIQPLENLVQCSQCPQPRYFRSERGLRIHIGKCHKQPLLSSPSETSVPPSQNSTAREPFWQTLSKLKHSVPVLRRIPRGARVAVAQKLAETIHKTVNENSRQAWENLLTFSYHTLHVTRDPQNNASLTSRVKKNCVTETELNQHFSLGFSTKNNIVKHVEDKISEGDIKGAARLLFSSDTIAPNSPETVLALQNKHPHQLSSQPFSDAHDVAPPLQTSVDSVRGAIMSFPPGSAGGLDGITPQHLKDLTSGCCGDAGEKLLQEVTNLCNLMLRGDVASDIVDILYGANLCALRKRDGGIRPIAVGSTYRRLTAKIACRSMNSLSSYFQPKQLGFACKGGCEAAVHSFRTHIQNSKNTVYLKVDVKNAFNSVDRVAMLIQIKTKAPTILPFMLQCYREPTKLIYQNHLIQSEVGCQQGDPLGPAIFSLAIHPVIELLNSKFNVWYLDDGTLASDASTVLSDFQTLIHEFKIIGLDLNLGKCELFVPDDCEDRDGIVSSFKAVAPELSVIEKSSLFLLGSPILADSFPEYIKEKVQNFSESLDRLLQINSHMAFTLIRYCLFVPKLTYVLRCCQLWKFPQLLHSLDDTLKHTLSTILNINFDERSWTQATLPVRFGGLGVRKISDIALPAFLSSFHANRAVIAKILEPSSCPLVIPFADEAKDAWNIASAGSRVPENTSSQRLWDGPVCELVRNKLFNTSTSVAERARLLAVERWESGAWLRALPSKNIGTLLDRNTFRLATALRLGAPHVVPHQCVCGAHVDSYGHHGLCCSRSSGRFTRHHNLNDLIRRALVTAGVPAILEPSGLARDDGKRPDGMTLVPWNMGRALVWDATCVDTLASSHVQGTSSCAGAAANQAENLKRRKYENLSGDLIFEPFGVETLGAWGPGAHKVFREISKRLIEATRDPRAGSYLAQRIAIAIQRGNAVSLLGTLPDGDDMGKFFFL

SEQ ID NO: 33320 - protein, 895 aa, Glaucopsyche alexis
MLSSSQDVGTSTDDVTVPLENLVQCLQCPQPRYFKSERGLRIHIGKCHKKSLAPSPSVFLSSQISTEHQPFWQEISKLKNSVPILRRIPRGARVAVAQKLAETVHKTVSENSRQAWEHLFTFPYRILHVTRDPHNNASLTSLVKKNCVSVFDSNLNFSLPSSTKNNILKNVENKISEGDIKGAARLLFSNDTIAPNSPETLTALQNKHPPQLLPQLFPDTDNAEPALQTSVDSVRGAIMSFLPGSAGGLDGLTPQHLKDLTSGCCGEAGEKLLQEVTNLCNLMLRGGVASNVVDILYGANLCALRKRDGGIRPIAVGSTYRRLTAKIACRSINSLASYFQPKQLGFACKGGCEAAVHSFRTFIQNQNDSVFLKVDVKNAFNSVNRVAMLAQIKAKAPAILPFMLQCYKEPTKLIYKNNLVSSEVGCQQGDPLGPAIFSLAIHPAIELLNSKFKVWYLDDGTLGSDASTVLSDFRTLIHEFQNIGLDLNFGKCELFVPDNCEDREAVISSFKEVAPQLSVIEKGSLLLLGSPILDDSLPEFINNKLQNFSENLDRLLQINCHMAFTLIRYCLFVPKFTYVLRCCQLWKFPQLLKRLDDTIKHTLSSILNINFDHRSWTQATLPVRFGGLGIRQTSDIALPAFLSSVHANHAVILKILERSSCPLVIPFADEAKDAWGNASAGSNVPENTFSQRLWDEPICRLVRNRLFNTSSSPAERARLLAVEKWESGVWLQALPSANTGTLLGRNTFRLATALRLGAPHVVPHQCVCGANVDSHGYHGLCCSRSAGRISRHHSLNDLIRRALVTAGVPAILEPSGLVRDDGKRPDGMTLVPWSVGRALVWDATCVDTLAPSHIQGTSNSAGAAANQAENLKRRKYENLSGDLIFEPFGVETLGA

SEQ ID NO: 33321 - protein, 956 aa, Glaucopsyche alexis
MLSSSQDVGTSTDDVTVPLENLVQCTQCPQPRYFKSERGLRIHIGKCHKLSLAPSPSVVLPSQNSTEHQPFWQEISKLKNSVPILRRIPRAARVAVAQKLAETVHKTVSENSRQAWEHLFTFPYRILHVTRDPRNNASLTSLVKKNCVSDSDLHPNFYSPSSAKNNIIKNVENKISEGDIKGAARLLFSNDTIAPNSPETLTALQNKHPPQLSPHLFLDTDDAEPALQTSVDSVRGAIMSFLPGSAGGLDGLTPQHLKDLTSGCCGEAGEKLLQEVTNLCNLMLRGGVASDIVDILYGANLCALRKRDGGIRPIAVGSTYRRLTAKIACRSINSLASYFQPKQLGFACKGGCEAAVHSFRTFIKNQNNSVFLKVDVKNAFNSVNRVAMLAQIKAKAPAILPFMLQCYKEPTKLIYKNHLIPSEVGCQQGDPLGPAIFSLAIHPAIELLNSKFNVWYLDDGTLGSDASTVLSDFRTLIHEFQNIGLELNFGKCELFVPDNCEDRETVISRFKEVAPQLSVIEKGSLLLLGSPILDDSLPDFINNKLQNFTETLDRLLQINCHMAFTLIRYCLFVPKFTYVLRCCQLWKFPQLLKRLDDTIKHTLSSILNIKFDHRSWTQATLPVRFGGLGIRQTSDVAVPAFLSSVHANHAVILKILERSSCPLVIPFADEAKDAWDIASAGSNVPENTFSQRLWDEPICRLVRNRLFNTSSSPVERARLLAVEKWESGVWLQALPSANTGTLLGRNTFRLATALRLGAPHVVPHQCVCGANVDSHGHHGLCCSRSAGRISRHHSLNDLIRRALVTAGVPAILEPSGLARDDGKRPDGMTLVPWSVGRALVWDATCVDTLAPSHVQGTSNCAGAAANQAENLKRRKYENLSGDLIFEPFGVETLGAWGPGAHKLFKEISKKLTEATRDPRAGNYLAQRIAIAIQRGNAISLLGTLPDGDDLGKFFYL

SEQ ID NO: 33322 - protein, 958 aa, Aricia agestis
MLSNSQDAGTSTDDAIVPLEILVQCTQCPQPRYFRSERGLRIHRGKCHKEPLLSSPSDAPVSPSQNSTAREPFWQTISKLKQSVPVLRRIPRGARVAVAQKLAETIHKTVNENSRQAWENLLTFPYRTLHVTRDPQNNTSLTSRVKKNCASDIVLNQNFPLCSSGKNNIVKNVENKISEGDIKGAARLLFSSDTIAPNSPETVSALQKKHPHQLTSQHISDAHDGTPPLQTTVDSVRGAIMSFPPGSAGGLDGITSQHLKDLTSGCCGDAGEKLLQEVTNLCNLMLRGEVASDIVDILYGANLCALRKRDGGIRPIAVGSTYRRLTAKIACRSIKSLSSYFQPKQLGFACKGGCEAAVHSFRTHVQNSKNSIYLKVDVSNAFNSVDRVAMLTQIKTKAPTILPFMLQCYRDPTKLIYQNHLIQSEVGCQQGDPLGPAIFSLAIHPVIELLNSKFNVWYLDDGTLASDASTVLSDFQTLIREFKIIGLDLNLGKCELFVPDDCGDRDEIISSFKAVAPELSVIEKSALFLLGSPVLADSFPDYINEKTRNFSESLDRLLQINSHMAFTLIRYCLFVPKFTFALRCCQLWKFPELLHSLDDTLKHTLSTILNIKFDERSWTQATLPVRFGGLGIRKTSDTALPAFLSSVHANRAVIAKILEPSSCPFVIPFADEAKDAWDIASAGSEVPKNTSSQRLWDEPICELVRNKLFNTSTSAVERARLLAVERWESGAWLQALPSKNTGTLLDRNTFRLATALRLGVPHVVPHQCVCGARVDSYGHHGLCCSRSAGRFSRHHNLNDLIRRALVTAGVPAILEPSGLARDDGKRPDGMTLVPWNVGWALVWDATCVDTLASSHIQSTSSCAGAAANQAENLKRRKYDNLSGDLIFEPFGVETLGAWGPGAHKLFRGISKKLVEATRDPRAGSYLAQRIAIAIQRGNAVSLLGTLPDGDDLGKFFFL

SEQ ID NO: 33323 - protein, 947 aa, Glaucopsyche alexis
MTRSQDAGTSTDITTVSLGNLQQCSHCSRYFKSQRGLNIHVGKCHKQLPTLIPLITTSLPNPIYQTSFWQKISKFKRFVPVLKRIPRGARVTVAQKLAETIRHTVLENSRQAWENLLTFPYRFLHVTRDRLNNASLTSRIKKNCVSDIDLNPNFSLHSSAKFNLVKSVENKISEGDIKGAARLLFSNDTVAPDCPETLIALQNKHPSQSNPFTASDEALPPLQTSADKVRGAIMSFLPGSAGGLDGLTPQHLKDLTSGCCGEAGEKLLNELTNLCNLMLRGGVASDIVDILYGANLCALKKRDGGIRPIAVGSTYRRLTAKSITSLASYFQPKQLGFACKGGCEAAVHSFRTAIHNQGDDVFLKVDVKNAFNSVERGAMLAQIKSKAPAILPFILQCYNDPTKLIYKDHLISSEVGCQQGDPLGPAIFSLAIHPVIELLNSKFNVWYLDDGTIGSDAPTVLSDFQTLIREFQKIGLELNLGKCELFVPDSCEDRNAIISSFKEIAPQLSVIDKDSLFLLGSPILDESLPEFINNKLQNFSETLDRLLQINCHMAFTLIRYCVFVPKFTYVLRCCQLWKFPQLLKQLDDTIRHTLSTILNISFDDRSWTQATLPVRFGGLGVRKPSDISLPAYLSSVHANHRLIFKILEHQSYSIIVPFLDEAKDVWSATSACSELPDNVFSQRLWDEPLCRLVRNNLLNTSSSPVEQARLLAAEKWESGLWLQALPSPNTGTLLDRTAFRIATSLRLGTSHVVPHRCVCGANVDSLGHHGLSCQRSAGRISRHHCLNDLIRRALVTAGVPAVLEPSGLARDDGKRPDGMTLVPWRVGRALVWDATCVDTLAPSHVQGTSSTAGAAANQAENFKRRKYENLSGDLIFEPFGVETLGSWGPGAHKLFREISKKLIEATRDPRAGTYLAQRVSIVIQRGNSLSLLGTLPGGDDLGDFFLL

SEQ ID NO: 33324 - protein, 951 aa, Glaucopsyche alexis
MTRSQDAGTSTDITTVSLGNLQQCSHCSRYFKSQRGLNIHVGKCHKQLPTLIPLITTSLPNPIYQTSFWQKISKFKRFVPVLKRIPRGARVTVAQKLAETIRHTVLENSRQAWENLLTFPYRFLHVTRDPLNNASLTSRIKKNCVSDIDLNPNFSLHSSAKFNLVKSVENKISEGDIKGAARLLFSNDTVAPDCPETLIALQNKHPSQSNPFTASDDALPPQQTSADKVRGAIMSFLPGSAGGLDGLTPQHLKDLTSGCCGEAGEKLLNELTNLCNLMLRGGVASDIVDILYGANLCALKKRDGGIRPIAVSSTYRRLTAKLACKSITSLASYFQPKQLGFACKGGCEAAVHSFRTAIHNQGDDVFLKVDVKNAFNSVERGAMLAQIKSKAPAILPFILQCYNDPTKLIYKDHLISSEVGCQQGDPLGPAIFSLAIHPVIELLNSKFNVWYLDDGTIGSDAPTVLSDFQTLIREFQKIGLELNLGKCELFVPDRCEDRNAIISSFKEIAPQLSVIDKDSLFLLGSPILDESLPEFINNKLQNFSETLDRLLQINCHMAFTLIRYCVFVPKFTYVLRCCQLWKFPQLLKQLDDTIRHTLSTILNISFDDRSWTQATLPVRFGGLGVRKPSDISLPAYLSSVHANHRLIFKILEHQSYSIIVPFLDEAKDVWSATSACSELPDNVFSQRLWDEPLCRLVRNNLLNTSSSPVEQARLLAAEKWESGLWLQALPSPNTGTLLDRTAFRIATSLRLGTSHVVPHRCVCGANVDSLGHHGLSCQRSAGRISRHHCLNDLIRRALVTAGVPAVLEPSGLARDDGKRPDGMTLVPWRVGRALVWDATCVDTLAPSHVQGTSSTAGAAANQAENFKRRKYENLSGDLIFEPFGVETLGSWGPGAHKLFREISKKLIEATRDPRAGTYLAQRVSIAIQRGNSLSLLGTLPGGDDLGDFFLL

SEQ ID NO: 33325 - protein, 950 aa, Celastrina argiolus
MLSSQDAGTETDISTVSLGNLVQCSFCPQARYFKSQRGLNIHVGKCHKQLSSVTPPLPNAAYPTDFWHELSKFKCSLPVVKRIPRGARVPVAQKLAETVRKTVLENSRQAWEKLLTFPYRILHVNRDPLNNASLTSRIKKNCFSDTDLNIHFSSYSSTPKYNVVKTVENKLSMGDVKGAARLLFSSDTVAPDCPETLVALQNKHPTQISPNPPASADDTIPPLQTSADKVRGAIMSFLPGSAGGLDGLTSQHLKDLTSCCCGETGEKLLHELTNLCNLMLRGEVVTDIVDILYGANLCALKKRDIRPIAVGSTYRRLTAKLACKSLTFLASYFQPKQLGFACKGGCEAAVHSFRTAIHNQSGDVFLKVDVKNAFNSVDRVAMLAQIKLKAPAILPFMLQCYNDPTKLIYQNHLISSEVGCQQGDPLGPAIFSLAIQPVVELLNSKFNVWYLDVGTLGSDAHTVLSDFQNLIHELKKIGLELNLGKCELFVSDNCQDRDAIISRFKDVAPQLSIIDKGSLLLLGSPILDESLPDFIDNKLQNFCDTLDRLLQINCHMAFTIVRYCLFVPKFTYVLRCCQLWKFPELLKRLDDTLKHTLSSILNISFDHRSWTQATLPVRFGGLGIRKASDIALPAFLSSDHFNHTVISKILERSNYPLTIPFADEAKNAWDIVSAGSIVPENTSSQRLWDEPICRLVRNCLFNTSSSPAERARLLAVERWESGVWLQALPSANIGTLLDRSTFQLATALRLGAPHVVPHQCVCGANVDSYGHHGLCCTRSAGRISRHHSLNDLIRRALVTAGVPAILEPSGLARDDGKRPDGMTLVPWSVGRALVWDATCVDTLAPSHVQATSSCAGAAAYQAENLKRRKYETLGGDIIFEPFGVETLGSWGPGAHKLFKALSKKLMELTRDPRAGTYLAQRIAIAIQRGNAVSLLGTLPEGDDLAAFFYL

SEQ ID NO: 33326 - protein, 952 aa, Celastrina argiolus
MLSSQDAGTETDISTVSLGNLVQCSFCPQARYFKSQRGLNIYVGKCHKQRSSVTPPLPNAAYPTDFWHELSKFKCSLPVVKRIPRGARVPVAQKLAETVRKTVLENSRQAWEKLLTFPYRILHVNRDPLNNASLTSRIKKNCFSDTDLNIHFSSYSSTPKYNVVKTVENKLSMGDVKGAARLLFSSDTVAPVCLETLVALQNKHPTQISPNPPASADDTIPPLQTSADKVRGAIMSFLPGSAGGLDGLTSQHLKDLTSCCCGETGEKLLHELTNLCNLMLRGEVVTDIVDILYGANLCALKKRDGGIRPIAVGSTYRRLTAKLACKSLTFLASYFQPKQLGFACKGGCEAAVHSFRTAIHNQSGDVFLKVDVKNAFNSVDRVAMLAQIKLKAPAILPFMLQCYNDPTKLIYQNHLISSEVGCQQGDPLGPAIFSLAIQPVVELLNSKFNVWYLDDGTLGSDAHTVLSDFQNLIHELKKIGLELNLGKCELFVPDNCQDRDAIISRFKDVAPQLSIIDKGSLLLLGSPILDESLPDFIDNKLQNFCDTLDRLLQINCHMAFTIVRYCLFVPKFTYVLRCCQLWKFPELLKRLDDTLKHTLSSILNISFDHRSWTQATLPVRFGGLGIRKASDIALPAFLSSVHFNHTVISKILERSNYPLTIPFADEAKNAWDIVSAGSIVPENTSSQRLWDEPICRLVRNCLFNTSSSPAERARLLAVERWESGVWLQALPSANIGTLLDRSTFQLATALRLGAPHVVPHQCVCGANVDSYGHHGLCCSRSAGRISRHHSLNDLIRRALVTAGVPAILEPSGLARDDGKRPDGMTLVPWSVGRALVWDATCVDTLAPSHVQATSSCAGAAAYQAENLKRRKYETLGGDIIFEPFGVETLGSWGPGAHKLFKALSKKLMELTQDPRAGTYLAQRIAIAIQRGNAVSLLGTLPEGDDLAAFFYL

SEQ ID NO: 33327 - protein, 987 aa, Glaucopsyche alexis
MLSSSQDVGTSTDDVTVPLENLVQCLQCPQPRYFKSERGLRIHIGKCHKKSLAPSPSVFLSSQISTEHQPFWQEISKLKNSVPILRRIPRGARVAVAQKLAETVHKTVSENSRQAWEHLFTFPYRILHVTRDPHNNASLTSLVKKNCVSDFDSNLNFSLPSSTKNNILKNVENKISEGDIKGAARLLFSNDTIAPNSPETLTALQNKHPPQLLPQLFPDTDNAEPALQTSVDSVRGAIMSFLPGSAGGLDGLTPQHLKDLTSGCCGEAGEKLLQEVTNLCNLMLRGGVASDVVDILYGANLCALRKRDGGIRPIAVGSTYRRLTAKIACRSINSLASYFQPKQLGFACKGGCEAAVHSFRTFIQNQNDSVFLKVDVKNAFNSVNRVAMLAQIKAKAPAILPFMLQCYKEPTKLIYKNNLVSSEVGCQQGDPLGPAIFSLAIHPAIELLNSKFNVWYLDDGTLGSDACTVLSDFRTLIHEFQNIGLDLNFGKCELFVPDNCEDREAVISSFKEVAPQLSVIEKGSLLLLGSPILDDSLPEFINNKLQNFSENLDRLLQINCHMAFTLIRYCLFVPKFTYVLRCCQLWKFPQLLKRLDDTIKHTLSSILNINFDHRSWTQATLPVRFGGLGIRQTSDVALPAFLSSVHANHAVILKILERSSCPLVIPFADEAKDAWDIASAGSNVPENTFSQRLWDEPICRLVRNRLFNTSSSPAERARLLAVEKWESGVWLQALPSANTGTLLGRNTFRLATALRLGAPHVVPHQCVCGANVDSHGYHGLCCSRSAGRISRHHSLNDLIRRALVTAGVPAILEPSGVVRDDGKRPDGMTLVPWSVGRALVWDATCVDTLAPSHIQGTSNCAGAAANQAENLKRRKYENLSGDLIFEPFGVETLGAWGPGAHKLFKEISKKLTEATRDPRAGNYLAQRIAIAIQRGNAISLLGTLPDGDDLCILSFINVISFFFIRLYFIDSVRVFYSVFRIIASLKN

SEQ ID NO: 33328 - protein, 909 aa, Glaucopsyche alexis
MLSSQDAGTSIDISTVSLGNLVQCSHCPQARYFKSQRGLNIHRGKCHKQLFDPILPATSPLPNPTCQTNFCQEISKFKCSVPIVKRIPRGARVAVAQKLAETVRHTALDNSRQAWEKLLTFPYSILHVTRDPLNNASLTSRIKKNCVSDTDFNPNSFSHYSAKYNLVKNVENKVSEGDIKGAARLLFSNDTVAPDCPETLIALQNKHPPQLTPNPFTASDDATPPLQTSADKVRGAIMSFLPGSSGGLDGLTPQHLKDLISGCCGEAGEKLLQELTNLCNLMLRGEVASDIVDILYGANLCALKKRDGGIRPIAVGCTFRRLTAKLACKSISSLSAYFQPKQLGFACKGGCEAAVHSFRTTAIQNQGDDVFLKVDVKNAFNSVNRVAILAQIKSKAPAILPFMLQCYNNPSKLIYKNHLIRSEVGCQQGDPLGPAIFSLAIHPAIELLNSNFNVWYLDDGTLGSDAATVLTDFRTLIHEFKKIGLELNLGKCELFVPDSCGDRNAIISSFKEIAPQLSVIEKDSLFLLGSPILDESLPAFINNKLQNFSETLDRLLQINCHMAFTLTRYCLFVPKFTYVLRCCQLWKFPQLLKQLDDAIRHTLSAILNINFDDRSWTQATLPVRFGGLGVRKPSDVSLPAFLSSVHANRILISKILEHPSYTNAVPFLDEAKDAWSVASGCNELPANTFSQRLWDEPLCRWVRNNLLNTSSSPTEQARLLAVEKWEADLWLQALPSPNTGTLLDRTTFRLATSLRLGVPHVVPHRCVCGTNVDSLGHHGLSCPRSAGRISRHHCLNDLIRRALVTAGVPAVLEPSGLSRDDGKRPDGMTLVPWRLGRALVWDATCVDTLAPSHVQGTSSTAGAATNQAENLKRRKYENLSRDLIFKPFGVETLGTWGHTNFSEKFRKNS

SEQ ID NO: 33329 - protein, 955 aa, Glaucopsyche alexis
MLSSQDAGTSIDISTVSLGNLVQCSHCPQARYFKSQRGLNIHRGKCHKQLFDPIPPATSPLPNPTCQTNFWQEISKFKCSVPIVKRIPRGARVAVAQKLAETVRHTALDNSRQAWEKLLTFPYSILHVTRDPLNNASLTSRIKKNCVSDTDFNPNSFSHYSAKYNLVKNVENKVSEGDIKGAARLLFSNDTVAPDCPETLIALQNKHPPQLTPNPFTASDDATPPLQTSADKVRRAIMSFLPGSSGGLDGLTPQHLKDLISGCCGEAGEKLLQELTNLCNLMLRGEVASDIVDILYGANLCALKKRDGGIRPIAVGSTFRRLTAKLACKSISSLSAYFQPKQLGFACKGGCEAAVHSFRTAIQNQGDDVFLKVDVKNAFNSVNRVAMLAQIKSKAPAILPFMLQCYNNPSKLIYKNHLIRSEVGCQQGDPLGPAIFSLAIHPAIELLNSNFNVWYLDDGTLGSDAATVLTDFRTLIHEFKKIGLELNLGKCELFVPDSCGDRNAIISSFKEIAPQLSVIEKDSLFLLGSPILDESLPAFINNKLQNFSETLDRLLQINCHMAFTLTRYCLFVPKFTYVLRCCQLWKFPQLLKQLDDTIRHTLSAILNINFDDRSWTQATLPVRFGGLGVRKPSDVSLPAFLSSVHANRILISKILEHPSYTNAVPFLDEAKDAWSVASGCNELPANTFSQRLWDEPLCRLVRNNLLNTSSSPTEQARLLAVEKWEAGLWLQALPSPNTGTLLDRTTFRLATSLRLGVPHVVPHRCVCGTNVDSLGHHGLSCPRSAGRISRHHCLNDLIRRALVTAGVPAVLEPSGLSRDDGKRPDGMTLVPWRLGRALVWDATCVDTLAPSHVQGTSSTAGAAANQAENLKRRKYENLSRDLIFEPFGVETLGTWGPGAHKLFGEISKKLVEATRDPKAGTYLAQRFSIAIQRGNSLSLIGTLPDGDDLEVFLFL

SEQ ID NO: 33330 - protein, 952 aa, Glaucopsyche alexis
MLSSQDAGTSIDISTVSLGNLVQYSHCPQARYFKSQRGLNIHRGKCHKQLFDPIPPATSPLPNPTCQTNFWQEISKFKCSVPIVKRIPRGARVAVAQKLAETVRHTALDNSRQAWEKLLTFPYSILHVTRDPLNNASLTSRIKKNCVSDTDFNPNSFSHYSAKYNLVKNKVSEGDIKGAARLLFFNDTVAPDCPETLIALQNKHPPQLTPNPFTASDDATPPLQTSADKVRGAIMSFLPGSSGGLDGLTPQHLKDLISGCCGEAGEKLLQELTNLCNLMLRGEVASDIVDILYGANLCALKKRDGGIRPIAVGCTFRRLTAKLACKSISSLSAYFQPKQLGFACKGGCEAAVHSFRTAIQNQGDDVFLKVDVKNAFNSVNRVAMLAQIKSKAPAILPFMLQCYNNPSKLIYKNHLIRSEVGCQQGDPLGPAIFSLAIHPAIELLNSNFNVWYLDDGTLGSDAATVLTDFRTLIHEFKKIGLELNLGKCELFVPDSCGDRNAIISSFKEIAPQLSVIEKDSLFLLGSPILDESLPAFINNKLQNFSETLDRLLQINCHMAFTLTRYCLFVPKFTYVLRCCQLWKFPQLLKQLDDTIRHTLSAILNINFDDRSWTQATLPVRFGGLGVRKPSDVSLPAFLSSVHANRILISKILEHPSYTNAVPFLDEAKDAWSVASGCNELPANTFSQRLWDEPLCRLVRNNLLNTSSSPTEQARLLAVEKWEAGLWLQALPSPNTGTLLDRTTFRLATSLRLGVPHVVPHHCVSGTNVDSLGHHGLSCPRSAGRISRHHCLNDLIRRALVTAGVPAVLEPSGLSRDDGKRPDGMTLVPWRLGRALVWDATCVDTLAPSHVQGTSSTAGAAANQAENLKRRKYENLSRDLIFEPFGVETLGTWGPGAHNLFGEISKKLVEATRDPKAGTYLAQRFSIAIQRGNSLSLIGTLPNGDNLEVFLFL

SEQ ID NO: 33331 - protein, 954 aa, Glaucopsyche alexis
MTRSQDAGTSTDITTVSLGNLQQCSHCSRYFKSQRGLNIHVGKCHKQLPTLIPLITTSLPNPIYQTSFWQKISKFKRFVPVLKRIPRGARVTVAQKLAETIRHTVLENSRQAWENLLTFPYRFLHVTRDPLNNASLTSRIKKNCVSDIDLNPNFSLHSSAKFNLVKSVEKKISEGDIKGAARLLFSNDTVAPDCPETLIALQNKHPSQSNPFTASDDALPPLQTSADKVRGAIMSFLPGSAGGLDGLTPQHLKDLTSGCCGEAGEKLLNELTNLCNLMLRGGVASDIVDILYGANLCALKKRDGGIRPIAVGSTYRRLTAKLACKSITSLASYFQPKQLGFACKGGCEAAVHSFRTAIHNQGDDVFLKVDVKNAFNSVERGAMLAQIKSKAPAILPFILQCYNDPTKLIYKDHLISSEVGCQQGDPLGPAIFSLAIHPVIELLNSKFNVWYLDDGTIGSDAPTVLSDFQTLIREFQKIGLELNLGKCELFVPDSCEARNAIISSFKEIAPQLSVIDKDSLFLLGSPILDESLPEFINNKLQNFSETLDRLLQINCHHGLQPFTLIRYCVFVPKFTYVLRCCQLWKFPQLLKQLDDTIRHTLSTILNISFDDRSWTQATLPVRFGGLGVRKPSDISLPAYLSSVHANHRLIFKILEHQSYSIIVPFLDEAKDVWSATSACSELPDNVFSQRLWDEPLCRLVRNNLLNTSSSPVEQARLLAAEKWESGLWLQALPSPNTGTLLDRTAFRIATSLRLGTSHVVPHRCVCGANVDRLGHHGLSCQRSAGRISRHHCLNDLIRRALVTAGVPAVLEPSGLARDDGKRPDGMTLVPWRVGRALVWDATCVDTLAPSHVQGTSSTAGAAANQAENFKRRKYENLSGDLIFEPFGVETLGSWGPGAHKLFREISKKLIEATRDPRAGTYLAQRVSIAIQRGNSLSLLGTLPGGDDLGDFFLL

SEQ ID NO: 33332 - protein, 889 aa, Celastrina argiolus
MLSSQDAGTETEISTVSLGNLVQCSFCPQARYFKSQRGLKIHVGTCHKQLSSVTPPLPNAAYQTDFWHELSKFKCSLPVVKRIPRGARVPVAQKLAETVRKTVLENSRQAWEKLLTFPYRILHVNRDPLNNASLTSRIKKNCFSDTDLNINFSSYSSTPKYNVVKTVENKLSMGDVKGAARLLFSSDTVAPDCPETLVALQNKHPTQISPNPPASADDTIPPLQTSADKVRGAIMSFLPGSAGGLDGLTSQHLKDLTSCCCGETGEKLLHELTNLCNLMLRGEVVTDIVDILYGANLCALKKRDGGIRPIVVGSTYRRLTAKLACKSLTFLASYFQPKQLGFACKGGCEAAVHSFRTAIHNQSGDVFLKVDVKNAFNSVDRVAMLAQIKLKAPAILPFMLQCYNDPTKLIYQNYLISSEVGCQQGDPLGPAIFSLAIQPVVELLNSKFNVWYLDDGTLGSDAHTVLSDFQNLIHELKKIGLELNLGKCELFVPDNCQDRDAIISRFKDVAPQLSIIDKGSLLLLGSPILDESLPVFIDNKLQNFCDTLCLLQINCHMAFTIVRYCLFVPKFMYVLRCCQLWKFPELLKRLDDTLKHTLSSILNISFDHRSWTQATLPVRFGGLGIRKASDIALPAFFSSVHFNHTVISKILERSNYPLTIPFADEAKNAWDIVSAGSIVPENTSSQRLWDEPICRLVRNCLFNTSSSPAERARLLAVERWKSGVWLQALPSANIGTLLDRSTFQLATALRLGAPHVVPHQCVCGANVDSYGHHGLCCTRSAGRISRHHSLNDLIRRALVTAGVPAILEPSGLASDDGKRPDGMTLVPWSVGRALVWDATCVDTLAPSHVQATSSCAGAAAYQAENLKRRKYETLGGDIIFEPFGVETLA

SEQ ID NO: 33333 - protein, 955 aa, Lysandra bellargus
MLRNSQDAGTSTDDAILPLENLVQCSQCPQPRYFRSERGLRIHIGKCHKQPLLSSPSETSVPPSQNSTAREPFWQTLSKLKHSVPVLRRIPRGARVAVAQKLAETIHKTVNENSRQAWENLLTFSYHTLHVTRDPQNNASLTSRVKKNCVTEIELNQHFSLGSSTKNNIVKHVEDKISEGDIKGAARLLFSSDTIAPNSPETVLALQNKHPHQLSSQPFSDAHDVAPPLQTSVDSVRGAIMSFPPGSAGGLDGITPQHLKDLTSGCCGDAGEKLLQEVTNLCNLMLRGDVASDIVDILYGANLCALRKRDGGIRPIAVGSTYRRLTAKIACRSINSLSSYFQPKQLGFACKGGCEAAVHSFRTHIQNSKNTVYLKVDVKNAFNSVDRVAMLTQIKTKAPTILPFMLQCYREPTKLIYQNHLIQSEVGCQQGDPLGPAIFSLAIHPVIELLNSKFNVWYLDDGTLASDASTVLSDFQTLIHEFKIIGLDLNLGKCELFVPDDCEDRDGIVSSFKAVAPELSVIEKSSLFLLGSPILADSFPDYIKEKVQNFSESLDRLLQINSHMAFTLIRYCLFVPKLTYVLRCCQLWKFSQLLHSLDDTLKHTLSTILNINFDERSWTQATLPVRFGGLGVRKISDIALPAFLSSFHANRAVIAKILEPSSCPLVIPFADEAKDAWNIASAGTENTSSQRLWDGPVCELVRNKLFNTSTSVAERARLLAVERWESGAWLRALPSKNIGTLLDRNTFRLATALRLGAPHVVPHQCVCGAHVDSYGHHGLCCSRSAGRFTRHHNLNDLIRRALVTAGVPAILEPSGLARDDGKRPDGMTLVPWNMGRALVWDATCVDTLASSHVQGTSSCAGAAANQAENLKRRKYENLSGDLIFEPFGVETLGAWGPGAHKVFREISKRLIEATRDPRAGSYLAQRIAIAIQRGNAVSLLGTLPDGDDMGKFFFL

SEQ ID NO: 33334 - protein, 931 aa, Celastrina argiolus
MLSSQDAGTETDISTVSLGNLVQCSFCPQARYFKSQRGLKIHVGKCHKQLSSVTPPLPNAAYQTDFWHELSKFKCSLPVVKRIPRGARVPVAQKLAETVRKTVLENSRQAWEKLLTFPYRILHVNRDPLNNASLTSRIKKNCFSDTDLNINFSSYSSTPKYNVVKTVENKLSMGDVKGAARRLFSSDTVAPDCPETLVALQNKHPTQISPNPPASADDTIPPLQTSADKVRGAIMSFLPGSAGGLDGLTSQHLKDLTSCCCGETGEKLLHELTNLCNLMLRGEVVTDIVDILYGANLCALKKRDGGIRPIAVGSTYRRLTAKLACKSLTFLASYFQPKQLGFACKGGCEAAVHSFRTAIHNQSGDVFLKVDVKNAFNSVDRVAMLAQIKLKAPAILPFMLQCYNDPTKLIYQNHLISSEVGCQQGDPLGPAIFSLGIQPVVELLNSKFNVWYLDDGTLGSDAHTVLSDFQNLIHELKKIGLDFNLGKCELFVPDNCQDRDAIISRFKDVAPQLSIIDKGSLLLLGSPILDESLPDFIDNKLQNFCDTLDRLLQINCHMAFTIVRYCLFVPKFTYVLRCCQLWKFPELLKRLDDTLKHTLSSILNISFDHRSWTQATLPVRFGGLGIRKASDIALPAFLSSVHFNHTVISKILERSNYPLTIPFADEAKNTWDIVSAGSIVPENTSSQRLWDEPICRLVRNCLFNTSSSPAERARLLAVERWEFQLATALRLGAPHVVPHQCVCSANVDIYGHHGLCCTRSAGRISRHHSLNDLIRRALVTAGVPAILEPSGLARDDDKRPDGMTLVPWSVGRALVWDATCVDTLAPSHVQATSSCAGAAAYQAENLKRRKYETLGGDIIFEPFGVETLGSWGPGAHKLFKALSKKLMELTQDPRAGTYLAQRIAIAIQRGNAVSLLGTLPEGDDLAAFFYL

SEQ ID NO: 33335 - protein, 972 aa, Endotricha flammealis
MRWREEELLLLAKTEASLTVRGARLMNMELLKALPNLGRSLEAIKGVRRKESYKELVRQCTASAASRTDSPCHAIMDSATVEPEGEPSGSRSVMEPPGPPDHIRGDPAEAPAEVADQIIADLLQRAAKRREAAERCANARRRGPVQGVEGRTNTAHTRMSARKRRRIEYARVQELYRKCPGRCAAEIIDGHSRGVKHGLGELEAYWRPIMEAVSDAPGASRDALKALRLEEARAGNGRDYSALWADISEDEVKSSRFDLRTSPGPDGIRPGDWGAIPALRKAEIFNSWLRQGEVPAALRQCRTVFVPKKDDASGPSDYRPISIASVPLRHMHSILARRLLDCCPPDVRQRGFIRADGTLENSAVLDAVLGDCRKKLRECHVAVLDFSKAFDMVSHGALIELLRNRGLPSAFCNYIAKLYNSSETVFTANGITSDNSVRMGRGVRQGDPLSPLLFNMVMDVVLANLPEGVGYRLESEKISALAYADDLILLAGSRVGMQESIDAVNRVGRQMGLLLSHGKSSVLSMVPDGKRKKPFYLVDRTFKLGNRWLKQVNCVERWRYLGVDFQNTGCVTLECDLRDALNNITKGPLKPQQRLEILRGSLIQRFLHGFVLGKISDERLKALDVQIRGVIRKWLRLPKDVPTGYFHASIADGGLAVLSLRSAVPELISKRYGQLASSGWSAAVAASKSERIRRKMQWARKQVLKFSAPVRPSSSVRSAAAYWREALHASVDGFELREATKTRESTKWVRERCGQYSGRDYVQFCHVAINALPSRIRNSRGRRVDGTPLNCRAGCMVRETTAHCIQQCHRTHGGRILRHDAIAKYLAANMEGKGWQVELEPRLNTGVGLRKPDLIAAREGAGVIVDVQVVSAQTPLDESHRLKCRKYASVEGLVEMVSGRLGLPDHSNVRVISCTISWRGVWSNRSLAELKQLGLPKFVFQEIPALVLRGSHMNWQRFNRMTTMLDGGDAPV

SEQ ID NO: 33336 - protein, 1253 aa, Boloria selene
MKRHIRDKRIGPLPGGRRGTSGAGAGHDSMWTASDSQPNRRAGVGVTRNVTAETHLTDDALQSRASATENSAGTSVMTTTSLDMMDKRRKWSQEEFEELMYCYYKAKHYGVGYLNKLKTLFVERNQHNPKINSFNGNTLATQARRIIKQKILSEEVLTRIKLNAENSEPETTEPLPQLTTIFDTDTLIHPTQNTLTSYSTNYLTQSSMSVTNQRTTYDMVSESNTQENLNTESQQIPQDCIENEEPVIVQFLQIIAETREIRVEEREYLPKPKFNKSYFQNFHKINAYIPQILNNEYSLQNINNTIYAAAKTLILNNSQKTYTISSSISNKNDKDPPWKKRIKNKIDILRREVGQLIEIGNGINSRKMLKIKDKLYIKYSISNEIDHQNTIEIIKQKIKAYAGRLRRYEEMNNRKNQNTFFHDNEHKFYKSLGTNHYNTNKLPSKDEVQDFWSNIYSHPISYNNAAEWISVVENSCSNITTKNFQEITVENIKQAVRKIHNWKAPGIDKVQNYYLKYFTSVHKYLALLFTDILNCKVSINNWFTTGYVILIPKNSDTQEPKNWRPIACLPSMYKLLTAVLAEELYIHCDLNKVMAPEQRGCRREVRGCKDHLIVNKAILEDANQNQKNLSMAWIDYKKAFDSISHNWLLKVLDIYKCPPIIKQFLEMVMPSWNMVMTARGSDTSIVTEPIYVKRGIFQGDSLSPLLFCLALNPLTQILSKLKGYKLKDNSKINHLLYMDDLKLYSNSKNNLKELLNSTEIFTNDIGMTFGLEKCNILHLTRGRRNSSEGDKHILISGEAFEHLGANENYKYLGINESGKIDHVALRDQITKEYYRRIKKLTYSYLNSRNLIKGINTYAVPVLLYSIGIVNLKNSDLKKIDIKTRKLLAIKKIVHKKADIQRLYLPITEGGRGLINIENMYKTQIIKYFQYLNKNTDYLIKTVKNHHSNKVKYSIIKEGKQYIREFQLSTKDIYTDKDIKEAITKIQKTQWRNKNMHGQFPIKVLDAVNIDKDLSFRWLKKHPISPILESTLFAIQDQATVTRQHERDILKRPTDGKCRLCMKKDETVQHLISGCDKLAPNSYIKRHNNLVKYIYWTLIKKHNMSSTNQWWKEDLDQPKIKENSSAKILWELPVHTDRTVMHNRPDLIYVNKSLNKTFLIDVTVPSDYNIGPKEIEKLNKYHTLKVEIDRLWNTQTTVIPIVIGATGVVAKNIIKYCEKLEANIDIGILQKQAAIHSSTIVHKVLANNIYLEES

SEQ ID NO: 33337 - protein, 1255 aa, Fabriciana adippe
MKRHIRDKRIGPLPGGRRGTFGADAERDSMWTVSDPQLNRRAGVGETRIVTAEPHPTGDALQSRASANENSVGTSVMTTTTLGTTDKRRKWSQEEFEELMYCYYKAKHDGVGYLDKLKTLFVERNQHNPKINSFNGNTLATQARRIIKQKILSEEVLTRIKLNAENSERQTTEPFPQLSHLTNICDEDTLIHPTQHTQTFYSTNYTTQSNMYVTTQETTYNTIPETITQDDLNSESQQIPQDCIENEEPIIVQFLQILAETKEIRVEDRESLPKPKFNKCYFQNFHKINAYIPKILNNEYSLQNINNTIYAAAKTLILYNNQKTYTPNSTLNKNEKDPPWKNRIKKKIDILRREVGQLIEIGNGINTRKILKIKDKLYNKYSVSSEIDHQNTVEIIKQKIKAYAGRLRRYEEMNNRKNQNILFRENEHKFYNNLDAKYNSTNKLPSKHELQDFWSNIYSHPISYNNSAAWIQEIEDSCSNITTKKFQEITVEHIKHAVRKIHNWKAPGIDKIQNYYLKYFTSIHKYLAFLFTDILNYKASLNDWFTTGYVILIPKNSDTHEPKNWRPIACLPSMYKLLTSILAEELYINCDINKVMAPEQRGCRRGVRGCKDHLMVNKTILENAHQNQKNLSMAWIDYQKAFDSISHNWLLKVLDIYKCPPIIKQFLEMVMPSWNMIMTARGANISIATEPIYVKRGIFQGDSLSPLLFCLALNPLTQVLSKLKGYKLKDSSQINHLLYMDDLKLYANSKSNLKSLLNSTEIFTNDIGMTFGLDKCNILHLTRGRRNSSEGDKHILISGDVFEHLGTNENYKYLGINESGKIDHVALRDQITKEYYKRIQKLTYSHLNSRNLIKGINTYAVPVLLYSIGIVNFKNSDLKKIDIKTRKLLAIKKIVHQKADIHRLYLPLTEGGRGLINIEYMYKTQIIKYFQYLNNNADYLIKAIQKHHTKRDKYSIIKEAKQYIKEFQLSTKDIYTDKEIKEAIIKIQKTQWRQKNMHGQFPIKVLGAVNIDKDFSFRWLKKHSLSPILESTVFAIQDQAVVTRQHERDILKRPNDGKCRLCMKKDETVQHLISGCDKLAPNHYIKGHDNLVKYIYWTLIKKHNMSTTNQWWKEDLDQPKIKENSSAKILWELPVHTDITVMHNRPDLIYINKSLNKTFLIDVTVPSDYNIGPKEIEKLNKYHSLKVEIDRLWNTQTTVIPIVIGATGVVAKNISKYCEKLEANIDIGILQKQAAIHSSTIVHKVLTNNIYIKES

SEQ ID NO: 33338 - protein, 1253 aa, Boloria selene
MKRHIRDKRIGPLPGGRRGTSGAGAGRDSMWTASDSQPNRRAGVGVTRNVTAETHLTDDALQSRASATENSAGTSVMTTTSLDMMDKRRKWSQEEFEELMYCYYKAKHYGVGYLNKLKTLFVERNQHNPKINSFNGNTLATQARRIIKQKILSEEVLTRIKLNAENSEPETTEPLPQLTTIFDTDTLIHPTQNALTSYSTNYLTQSSMSVTNQRTTYDMVSESNTQENLNTESQQIPQDCIENKEPVIVQFLQIIAETREIRVEEREYLPKPKFNKSYFQNFHKINAYIPQILNNEYSLQNINNTIYAAAKTLILNNSQKTYTISSSISNKNDKDPPWKKRIKNKIDILRREVGQLIELGNGINSRKMLKIKDKLYIKYSISNEIDHQNTIEIIKQKIKAYAGRLRRYEEMNNRKNQNTFFHDDEHKFYKSLGTNHYNTNKLPSKDEVQNFWSNIYSHPISYNNAAEWISVVENSCSNITTKNFQEITVENIKQAVRKIHNWKAPGIDKVPNYYLKYFTSVHKYLALLFTDILNCKVSLNNWFTTGYVILIPKNSDTQEPKNWRPIACLPSMYKLLTAVLAEELYIHCDLNKVMAPEQRGCRREVRGCKDHLMVNKAILEDANQNQKNLSMAWIDYKMAFDSISHNWLLKVLDIYKCPPIIKQFLEMVMPSWNMVMTARGSDTSIVTEPIYVKRGIFQGDSLSPLLFCLALNPLTQILSKLKGYKLKDNSQINHLLYMDDLKLYSNSKNNLKELLNSTEIFTNDIGMTFGLEKCNILHLTRGRRKSSEGDKHILIPGEAFEHLGANENYKYLGINESGKIDHVALRDQITKEYYRRIKKLTYSYLNSRNLIKGINTYAVPVLLYSIGIVNLKNSDLKKIDIKTRKLLAIKKIVHKKADIQRLYLPITEGGRGLINIENMYKTQIIKYFQYLNKNTDYLIKTVKNHHSNKVKYSIIKEGKQYIREFQLSTKDIYTDKDIKEAITKIQKTQWRNKNMHGQFPIKVLDAVNIDKDLSFRWLKKHTISPILESTLFVIQDQATVTRQHERDILKRPTDGKCRLCMKKDETVQHLISGCDKLAPNSYIKRHNNLVKYIYWTLIKKHNMSSTNQWWKEDLDQPKIKENSSAKILWELPVHTDRTVMHNRPDLIYVNKSLNKTFLIDVTVPSDYNIGPKEIEKLNKYHTLKVEIDRLWNTQTTVIPIVIGATGVVAKNIIKYCEKLEANIDIGILQKQAAIHSSTIVHKVLANNIYLEES

SEQ ID NO: 33339 - protein, 888 aa, Junonia stemosa
MLKIKDKLYNKYKINSEIDHQNTVEINKQKIKAYAGRLKRYEEMNNRKTQNTLFHENEHKFYKKLGTKHNTVIKLPTKHEIQEFWTNIYSHPISYNTAATWLRELEDSNSNIDTKNLQEITIEHIRNAVKKIHNWKAPGIDKIHNYYLKYFTNVHKYLALLFTDIINCKEPLHDWFTTGHVILIPKNTNTEEPKNWRPIACLPSMYKLITSILTEELHNHCDVNNVMAPEQRGCRRGVRGCKDHLMINKAILEDAHQYHKNVSMAWIDYQKAFDSISHSWLLKILDIYKCPPIIKQFLEMVMPSWRMIMSARGNETTITTEPIYVRRGIFQGDSLSPLLFCLAINPLSKFLNKYKIKGYKLKDSTHINHLLYMDDLKLYANSQNNLKTLLNNTELFTNDVGMNFGLDKCNILHLKGGRRNSSQGDKHILLSGEVFEHLGTNETYKYLGIHESGKIDHEALRDQITKEYFQRIKKLTYSHLNSRNLIKGINTYAVPVLLYSLGVVNYKNSDLKKIDVRTRKLLAIKKIHHQKADIQRLYLPVAEGGRGLINIEYMYKTQMIKYLQYLTNNTDYLIKSIYEHHVNKTKYSIIKEAKQYVRELQLETKNTYSDREIKQAIIKIQRTQWRNKNMHGQFPNNVLDRVNIDTELSFRWLKKHSLSAILESTVFAIQDQAVVTKQHERDILKRGVDGKCRLCMKKDETVQHLISGCDKLAANHYVNRHDNLVKYIYWSLLKKHNMSTTNQWWKENLAQPQIQQNDSAKILWELPVHTDITIPHNRPDLIYVNKLQNKTFLIDVTVPSDYNIGPKEIEKLNRYHSLKVEIDRLWNTQTTIIPIVVGATGVVAKNIIKYCEKLQANIDIGILQKQAAIHSSTIVHKVLANNIYIKED

SEQ ID NO: 33340 - protein, 1159 aa, Junonia neildi
MYCYYKAKYEGVGYLSKLQNLFMDRNPHNPKISNFNGNTLATQARRIVKQKILSEETLARIKLNAEKSEQEITERLSQIIDINEENISATQTTQQSQISFLTNNTLETFTPITIQDTQFDTAQETPANTHERLTPEHQQTLRNCIEDEDPIIIEFLQILAEVKETPVEERNSLPKPKFNKSYFQNFHKINDYIPQLLDNNQHNLQNVNNIIYAAAKTLILSNKQKEYKFDNSLKTNVKDPPWKNRIKKKIEILRREVGQLTEIENGISTRKMLKIKDKLYNKYKINSEIDHQNTVEINKQKIKAYAGRLKRYEEMNNRKNQNTLFHENEHKFYKKLGTKHNTVIKLPTKHEIQEFWTNIYSHPISYNTAATWLRELEDSNSNIDTKNLQEITIEHIRNAVKKIHNWKAPGIDKIHNYYLKYFTNVHKYLALLFTDIINCKEPLHDWFTTGHVILIPKNTNTEEPKNWRPIACLPSMYKLITSILTEELHNHCDVNNVMAPEQRGCRRGVRGCKDHLMINKAILEDAHQYHKNVSMAWIDYQKAFDSISHSWLLKILDIYKCPPIIKQFLEMVMPSWRMIMSARGNETTITTEPIYVRRGIFQGDSLSPLLFCLAINPLSKFLNKYKIKGYKLKDSTQINHLLYMDDLKLYANSQSNLKTLLNNTELFTNDVGMNFGLDKCNILHLKGGRRNSSQGDKHILLSGEVFEHLGTNETYKYLGIHESGKIDHEALRDQITKEYFQRIKKLTYSHLNSRNLIKGINTYAVPVLLYSLGVVNYKNSDLKKIDVRTRKLLAIKKIHHQKADIQRLYLPVAEGGRGLINIEYMYKTQMIKYLQYLTNNTDYLIKSIYEHHVNKTKYSIIKEAKQYLRELQLETKNTYSDREIKQAIIKIQRTQWRNKNMHGQFPNNVLDRVNIDTELSFRWLKKHSLSAILESTVFAIQDQAVVTKQHERDILKRGVDGKCRLCMKKDETVQHLISGCDKLAANHYVNRHDNLVKYIYWSLLKKHNMSTTNQWWKENLAQPQIQQNDSAKILWELPVHTDITIPHNRPDLIYVNKLQNKTFLIDVTVPSDYNIGPKEIEKLNRYHSLKVEIDRLWNTQTTIIPIVVGATGVVAKNIIKYCEKLQANIDIGILQKQAAIHSSTIVHKVLANNIYIKED

SEQ ID NO: 33341 - protein, 1159 aa, Junonia evarete
MYCYYKAKYEGVGYLSKLQNLFMERNPHNPKISNFNGNTLATQARRIVKQKILTEETLTRIKLNAEKSEQEITEGLPQIIDINEENISATQTTQQSQISFITNKTLETFTPITIQDTQFDTAQETPANTHERLTPEHQQTLRNSIEDEDPIIIEFLQILAEVKETPVEERNSLPKPKFNKSYFQNFHKINDYIPQLLDNNQHNLQNVNNIIYAAAKTLILSNKQKEYKFDNSLKTNAKDPPWKNRIKKKIEILRREVGQLTEIENGISTRKMLKIKDKLYNKYKINSEIDHQNTVEINKQKIKAYAGRLKRYEEMNNRKNQNTLFHENEHKFYKKLGTKHNTVIKLPTKHEIQEFWTNIYSHPISYNTAATWLRELEDSNSNIDTKNLQEITIEHIRNAVKKIHNWKAPGIDKIHNYYLKYFTNVHKYLALLFTDIINCKEPLHDWFTTGHVILIPKNTNTEEPKNWRPIACLPSMYKLITSILTEELHNHCDVNNVMAPEQRGCRRGVRGCKDHLMINKAILEDAHQYHKNVSMAWIDYQKAFDSISHSWLLKILDIYKCPPIIKQFLEMVMPSWRMIMSARGNETTITTEPIYVRRGIFQGDSLSPLLFCLAINPLSKFLNKYKIKGYKLKDSTHINHLLYMDDLKLYANSQNNLKTLLNNTELFTNDVGMNFGLDKCNILHLKGGRRNSSQGDKHILLSGEVFEHLGTNETYKYLGIHESGKIDHEALRDQITKEYFQRIKKLTYSHLNSRNLIKGINTYAVPVLLYSLGVVNYKNSDLKKIDVRTRKLLAIKKIHHQKADIQRLYLPVAEGGRGLINIEYMYKTQMIKYLQYLTNNTDYLIKSIYEHHVNKTKYSIIKEAKQYVRELQLETKNTYSDREIKQAIIKIQRTQWRNKNMHGQFPNNVLDRVNIDTELSFRWLKKHSLSAILESTVFAIQDQAVVTKQHERDILKRGVDGKCRLCMKKDETVQHLISGCDKLAANHYVNRHDNLVKYIYWSLLKKHNMSTTNQWWKENLAQPQIQQNDSAKILWELPVHTDITIPHNRPDLIYVNKLQNKTFLIDVTVPSDYNIGPKEIEKLNRYHSLKVEIDRLWNTQTTIIPIVVGATGVVAKNIIKYCEKLQANIDIGILQKQAAIHSSTIVHKVLANNIYIKED

SEQ ID NO: 33342 - protein, 1259 aa, Junonia coenia
MKRQNKDKRIGPLPGGRRGTFGAGAERDSMRSVSDSQLSRRAGVGVSRNVTAESQFTDDALQSRASANENSAGTSATTTTSLPHTKDKRRKWSQEELEELMYCYYKAKYEGVGYLSKLQNLFMERNPHNPKISNFNGNTLATQARRIVKQKILTEETLTRIKLNAEKSEQEITEGLPQIIDINEENISATQTTQQSQISFITNKTLETFTPITTQDTQFDTAQETPANTHERLTPEHQQTLRNSIEDEDPIIIEFLQILAEVKETPVEERNSLPKPKFNKSYFQNFHKINDYIPQLLDNNQHNLQNVNNIIYAAAKTLILSNKQKEYKFDNSLKTNAKDPPWKNRIKKKIEILRREVGQLTEIENGISTRKMLKIKDKLYNKYKINSEIDHQNTVEINKQKIKAYAGRLKRYEEMNNRKNQNTLFHENEHKFYKKLGTKHNTVIKLPTKHEIQEFWTNIYSHPISYNTAATWLRELEDSNSNIDTKNLQEITIEHIRNAVKKIHNWKAPGIDKIHNYYLKYFTNVHKYLALLFTDIINCKEPLHDWFTTGHVILIPKNTNTEEPKNWRPIACLPSMYKLITSILTEELHNHCDVNNVMAPEQRGCRRGVRGCKDHLMINKAILEDAHQYHKNVSMAWIDYQKAFDSISHSWLLKILDIYKCPPIIKQFLEMVMPSWRMIMSARGNETTITTEPIYVRRGIFQGDSLSPLLFCLAINPLSKFLNKYKIKGYKLKDSTHINHLLYMDDLKLYANSQNNLKTLLNNTELFTNDVGMNFGLDKCNILHLKGGRRNSSQGDKHILLSGEVFEHLGTNETYKYLGIHESGKIDHEALRDQITKEYFQRIKKLTYSHLNSRNLIKGINTYAVPVLLYSLGVVNYKNSDLKKIDVRTRKLLAIKKIHHQKADIQRLYLPVAEGGRGLINIEYMYKTQMIKYLQYLTNNTDYLIKSIYEHHVNKTKYSIIKEAKQYVRELQLETKNTYSDREIKQAIIKIQRTQWRNKNMHGQFPNNVLDRVNIDTELSFRWLKKHSLSAILESTVFAIQDQAVVTKQHERDILKRGVDGKCRLCMKKDETVQHLISGCDKLAANHYVNRHDNLVKYIYWSLLKKHNMSTTNQWWKENLAQPQIQQNDSAKILWELPVHTDITIPHNRPDLIYVNKLQNKTFLIDVTVPSDYNIGPKEIEKLNRYHSLKVEIDRLWNTQTTIIPIVVGATGVVAKNIIKYCEKLQANIDIGILQKQAAIHSSTIVHKVLANNIYIKED

SEQ ID NO: 33343 - protein, 888 aa, Junonia zonalis
MLKIKDKLYNKYKINSEIDHQNTVEINKQKIKAYAGRLKRYEEMNNRKNQNTLFHENEHKFYKKLGTKHNTVIKLPTKHEIQEFWTNIYSHPISYNTAATWLRELEDSNSNIDTKNLQEITIEHIRNAVKKIHNWKAPGIDKIHNYYLKYFTNVHKYLALLFTDIINCKEPLHDWFTTGHVILIPKNTNTEEPKNWRPIACLPSMYKLITSILTEELHNHCDVNNVMAPEQRGCRRGVRGCKDHLMINKAILEDAHQYHKNVSMAWIDYQKAFDSISHSWLLKILDIYKCPPIIKQFLEMVMPSWRMIMSARGNETTITTEPIYVRRGIFQGDSLSPLLFCLAINPLSKFLNKYKIKGYKLKDSTHINHLLYMDDLKLYANSQSNLKTLLNNTELFTNDVGMNFGLDKCNILHLKGGRRNSSQGDKHILLSGEVFEHLGTNETYKYLGIHESGKIDHEALRDQITKEYFQRIKKLTYSHLNSRNLIKGINTYAVPVLLYSLGVVNYKNSDLKKIDVRTRKLLAIKKIHHQKADIQRLYLPVAEGGRGLINIEYMYKTQMIKYLQYLTNNTDYLIKSIYEHHVNKTKYSIIKEAKQYVRELQLETKNTYSDREIKQAIIKIQRTQWRNKNMHGQFPNNVLDRVNIDTELSFRWLKKHSLSAILESTVFAIQDQAVVTKQHERDILKRGVDGKCRLCMKKDETVQHLISGCDKLAANHYVNRHDNLVKYIYWSLLKKHNMSTTNQWWKENLAQPQIQQNDSAKILWELPVHTDITIPHNRPDLIYVNKLQNKTFLIDVTVPSDYNIGPKEIEKLNRYHSLKVEIDRLWNTQTTIIPIVVGATGVVAKNIIKYCEKLQANIDIGILQKQAAIHSSTIVHKVLANNIYIKED

SEQ ID NO: 33344 - protein, 1159 aa, Junonia coenia
MEELMFCYYKAKYEGVGYLSKLQNLFVERNQHNPKISHFNGNTLATQARRIIKLKILSEEILTRIKFNAENSEQKTTERMPQTIDIHEENTSIIHSTQHIQSPLISTVESYTQLITHDTQSSTTPEESMMSHEILTSECQASQNCVENEDPIIIEFLQILAEVKETPVEKRESLPKPKFNKCYFEIFHKINDYLPQLLDNQYSLQNINNIIYAAAKTLIINNNQKTYKSNNTFEKNKKDPPWKCRIKKKIDILRREVGQLIEIGNGISTRKVLKIKDKLYHKYNICNEIDHQNTIEINKQKIKAYAGRLRRYEEMNNRKNQNTSFRDNEHKFYKNLGVKHNTVTKLPTKHEIESFWSDIYSHSISYNSSATWIQELEESCSNINTKDFKEITVEHIKNAVRKIHNWKAPGIDKIHNYYLKYFTSIHKYLALLYTDILNCKEILSDWFTTGYVILIPKNSDTEEPKNWRPIACLPSMYKLLTSILTEELYIHCDMNKILAPEQRGCRRGVRGCKDHLMVNKAVLEDAHQNHKNVSMAWIDYQKAFDSISHSWLLRVLDIYKCPPIIKQFLKAIMPSWRMIMTARGTETTIATEPISVRRGIFQGDSLSPLLFCLAINPLTKLLNQYKTKGYKLKDNTHVNHLLYMDDLKLYANNQNNLQVLLNNTEIFTNDIGMNFGLNKCNILHLTGGRRNNSQGDKHILLSGEVIEHLGINETYKYLGIHESGKIDHEAIREQITKEYFKRIKKLTYSHLNSRNLLKGINTFAVPVLLYSIGVVNFKNSDLKKIDVKTRKLLAIKKIVHQKADIHRLYIPVTEGGRGLINIEYMYKSQIIKYSQYLSNDSDYLIKAVKNHHINKGKYSIIKEAKQYTKELQLLTKNTYSDNDIKQAILKIQKAQWRNKNMHGQFPNNVLDRVNIDIQLSFQWIKKHSLSAVLEATIFAIQDQAVVTKQHERDILKRAVDGKCRLCMKKDETVQHLISGCDKLAPNHYVNRHDNLVKYVYWSLLKKHNMNTTNQWWKENLTQPQIQQNDSAKILWELPVHTDMTIPHNRPDLIYVNKHHNKTFLIDVTVPSDYNIGPKEIEKLNRYHSLKIEIDRLWNTQTEIIPIVIGATGVVAKNIIKYCDKLQANIDIGILQKQAAIHSSTIVHKVLANNIYIKDV

SEQ ID NO: 33345 - protein, 1259 aa, Junonia pacoma
MKRQNKDKRIGPLPGGRRGTFGAGAERDSMRSVSDSQLSRRAGVGVSRNVTAESQLTDDALQSRASANENSAGTSATTTTSLPHTKDKRRKWSQEELEELMYCYYKAKYEGVGYLSKLQNLFMERNPHNPKISNFNGNTLATQARRIVKQKILTEETLTRIKLNAEKSEQEITEGLPQIIDINEENISATQTTQQSQISFITNKTLETFTPITIQDTQFDTAQETPANTHERLTPEHQQTLRNSIEDEDPIIIEFLQILAEVKETPVEERNSLPKPKFNKSYFQNFHKINDYIPQLLDNNQHNLQNVNNIIYAAAKTLILSNKQKEYKFDNSLKTNVKDPPWKNRIKKKIEILRREVGQLTEIENGISTRKMLKIKDKLYNKYKINSEIDHQNTVEINKQKIKAYAGRLKRYEEMNNRKNQNTLFHENEHKFYKKLGTKHNTVIKLPTKHEIQEFWTNIYSHPISYNTAATWLRELEDSNSNIDTKNLQEITIEHIRNAVKKIHNWKAPGIDKIHNYYLKYFTNVHKYLALLFTDIINCKEPLHDWFTTGHVILIPKNTNTEETKNWRPIACLPSMYKLITSILTEELHNHCDVNNVMAPEQRGCRRGVRGCKDHLMINKAILEDAHQYHKNVSMAWIDYQKAFDSISHSWLLKILDIYKCPPIIKQFLEMVMPSWRMIMSARGNETTITTEPIYVRRGIFQGDSLSPLLFCLAINPLSKFLNKYKIKGYKLKDSTHINHLLYMDDLKLYANSQNNLKTLLNNTELFTNDVGMNFGLDKCNILHLKGGRRNSSQGDKHILLSGEVFEHLGTNETYKYLGIHESGKIDHEALRDQITKEYFQRIKKLTYSHLNSRNLIKGINTYAVPVLLYSLGVVNYKNSDLKKIDVRTRKLLAIKKIHHQKADIQRLYLPVAEGGRGLINIEYMYKTQMIKYLQYLTNNTDYLIKSIYEHHVNKTKYSIIKEAKQYVRELQLETKNTYSDREIKQAIIKIQRTQWRNKNMHGQFPNNVLDRVNIDTELSFRWLKKHSLSAILESTVFAIQDQAVVTKQHERDILKRGVDGKCRLCMKKDETVQHLISGCDKLAANHYVNRHDNLVKYIYWSLLKKHNMSTTNQWWKENLAQPQIQQNDSAKILWELPVHTDITIPHNRPDLIYVNKLQNKTFLIDVTVPSDYNIGPKEIEKLNRYHSLKVEIDRLWNTQTTIIPIVVGATGVVAKNIIKYCEKLQANIDIGILQKQAAIHSSTIVHKVLANNIYIKED

SEQ ID NO: 33346 - protein, 888 aa, Junonia neildi
MLKIKDKLYNKYKINSEIDHQNTVEINKQKIKAYAGRLKRYEEMNNRKNQNTLFHENEHKFYKKLGTKHNTVIKLPTKHEIQEFWTNIYSHPISYNTAATWLRELEDSNSNIDTKNLQEITIEHIRNAVKKIHNWKAPGIDKIHNYYLKYFTNVHKYLALLFTDIINCKEPLHDWFTTGHVILIPKNTNTEEPKNWRPIACLPSMYKLITSILTEELHNHCDVNNVMAPEQRGCRRGVRGCKDHLMINKAILEDAHQYHKNVSMAWIDYQKAFDSISHSWLLKILDIYKCPPIIKQFLEMVMPSWRMIMSARGNETTITTEPIYVRRGIFQGDSLSPLLFCLAINPLSKFLNKYKIKGYKLKDSTQINHLLYMDDLKLYANSQSNLKTLLNNTELFTNDVGMNFGLDKCNILHLKGGRRNSSQGDKHILLSGEVFEHLGTNETYKYLGIHESGKIDHEALRDQITKEYFQRIKKLTYSHLNSRNLIKGINTYAVPVLLYSLGVVNYKNSDLKKIDVRTRKLLAIKKIHHQKADIQRLYLPVAEGGRGLINIEYMYKTQMIKYLQYLTNNTDYLIKSIYEHHVNKTKYSIIKEAKQYVRELQLETKNTYSDREIKQAIIKIQRTQWRNKNMHGQFPNNVLDRVNIDTELSFRWLKKHSLSAILESTVFAIQDQAVVTKQHERDILKRGVDGKCRLCMKKDETVQHLISGCDKLAANHYVNRHDNLVKYIYWSLLKKHNMSTTNQWWKENLAQPQIQQNDSAKILWELPVHTDITIPHNRPDLIYVNKLQNKTFLIDVTVPSDYNIGPKEIEKLNRYHSLKVEIDRLWNTQTTIIPIVVGATGVVAKNIIKYCEKLQANIDIGILQKQAAIHSSTIVHKVLANNIYIKED

SEQ ID NO: 33347 - protein, 888 aa, Junonia litoralis
MLKIKDKLYNKYKINSEIDHQNTVEINKQKIKAYAGRLKRYEEMNNRKNQNTLFHENEHKFYKKLGTKHNTVIKLPTKHEIQEFWTNIYSHPISYNTAATWLRELEDSNSNIDTKNLQEITIEHIRNAVKKIHNWKAPGIDKIHNYYLKYFTNVHKYLALLFTDIINCKEPLHDWFTTGHVILIPKNTNTEEPKNWRPIACLPSMYKLITSILTEELHNHCDMNNVMAPEQRGCRRGVRGCKDHLMINKAILEDAHQYHKNVSMAWIDYQKAFDSISHSWLLKILDIYKCPPIIKQFLEMVMPSWRMIMSARGNETTITTEPIYVRRGIFQGDSLSPLLFCLAINPLSKFLNKYKIKGYKLKDSTHINHLLYMDDLKLYANSQNNLKTLLNNTELFTNDVGMNFGLDKCNILHLKGGRRNSSQGDKHILLSGEVFEHLGTNETYKYLGIHESGKIDHEALRDQITKEYFQRIKKLTYSHLNSRNLIKGINTYAVPVLLYSLGVVNYKNSDLKKIDVRTRKLLAIKKIHHQKADIQRLYLPVAEGGRGLINIEYMYKTQMIKYLQYLTNNTDYLIKSIYEHHVNKTKYSIIKEAKQYVRELQLETKNTYSDREIKQAIIKIQRTQWRNKNMHGQFPNNVLDRVNIDTELSFRWLKKHSLSAILESTVFAIQDQAVVTKQHERDILKRGVDGKCRLCMKKDETVQHLISGCDKLAANHYVNRHDNLVKYIYWSLLKKHNMSTTNQWWKENLAQPQIQQNDSAKILWELPVHTDITIPHNRPDLIYVNKLQNKTFLIDVTVPSDYNIGPKEIEKLNRYHSLKVEIDRLWNTQTTIIPIVVGATGVVAKNIIKYCEKLQANIDIGILQKQAAIHSSTIVHKVLANNIYIKED

SEQ ID NO: 33348 - protein, 1244 aa, Junonia genoveva
MNNASVEVAINNDQTIATKAGSVSDSQLSRRAGVGVSRNVTAESQFTDDALQSRASANKNSAGTSATTTTSLNTKDKRRKWSQEEMEELMFCYYKAKYEGVGYLSKLQNLFVERNQHNPKISHFNGNTLATQARRIIKLKILSEETLTRIKFNAENSEQKTTERMPQTIDIHEENTSIIHSTQHIQSPLISTVESYTQLITHDTQSSTTPEESMMSHEILTSECQASQNCVENEDPIIIEFLQILAEVKETPVEKRESLPKPKFNKCYFEIFHKINDYLPQLLDNQYSLQNINNIIYAAAKTLIINNNQKTYKSNNTFEKNKKDPPWKCRIKKKIDILRREVGQLIEIGNGISTRKVLKIKDKLYHKYNICNEIDHQNTTEINKQKIKAYAGRLRRYEEMNNRKNQNTSFRDNEHKFYKNLGVKHNTVTKLPTKHEIESFWSDIYSHSISYNSSATWIQELEESCSNINTKDFKEITVEHIKNAVRKIHNWKAPGIDKIHNYYLKYFTSIHKYLALLYTDILNCKEILSDWFTTGYVILIPKNSDTEEPKNWRPIACLPSMYKLLTSILTEELYIHCDINKILAPEQRGCRRGVRGCKDHLMVNKAVLEDAHQNHKNVSMAWIDYQKAFDSISHSWLLRVLDIYKCPPIIKQFLKMIMPSWRMIMTARGTETTIATEPISVRRGIFQGDSLSPLLFCLAINPLTKLLNQYKTKGYKLKDNTHVNHLLYMDDLKLYANNQNNLQVLLNNTEIFTNDIGMNFGLNKCNILHLTGGRRNNSQGDKHILLSGEVIEHLGINETYKYLGIHESGKIDHEAIRDQITKEYFKRIKKLTYSHLNSRNLLKGINTFAVPVLLYSIGVVNFKNSDLKKIDVKTRKLLAIKKIVHQKADIHRLYIPVTEGGRGLINIEYMYKSQIIKYSQYLSNDSDYLIKAVKNHHINKGKYSIIKEAKQYTKELQLLTKNTYSDNDIKQAILKIQTAQWRNKNMHGQFPNNVLDRVNIDIQLSFQWIKKHSLSAVLEATIFAIQDQAVVTKQHERDILKRAVDGKCRLCTKKDETVQHLISGCDKLAPNHYVNRHDNLVKYVYWSLLKKHNMNTTNQWWKENLTQPQIQQNDSAKILWELPVHTDMTIPHNRPDLIYVNKHHNKTFLIDVTVPSDYNIGPKEIEKLNRYHSLKIEIDRLWNTQTEIIPIVIGATGVVAKNIIKYCDKLQANIDIGILQKQAAIHSSTIVHKVLANNIYIKDV

SEQ ID NO: 33349 - protein, 1256 aa, Junonia stemosa
MKRQNKDKRIGPLPGGRRGTFGAGAERDSMRSVSDSQLSRRAGVGVSRNVTAESQLTDDALQSRASANENSAGTSATTTTSLNTKDKRRKWSQEEMEELMFCYYKAKHEGVGYLSKLQNLFVERNQDNPKISHFNGNTLATQARRIIKLKILSEETLTRIKFNAENSEQKTAERMPQIIDIHEENTSVIHSIEHIQSPLISNNTVESYTQLITNDTQSSTTPEESMMSHEILTSECQASQNCIENEDPIIIEFLQILAEVKETPVEKRESLPKPKFNKCYFEIFHKINDYLPQLLDNQYSLHNINNIIYAAAKTLIINNNQKTYKSNNTFEKNKKDPPWKCRIKKKIDILRREVGQLIEIGNGISTRKVLKIKDKLYHKYNICNEIDHQNTIEINKQKIKAYAGRLRRYEEMNNRKNQNTSFRDNEHKFYKNLGVKHNTVTKLPTKHEIESFWSDIYSHSISYNSSATWIQELEESCSNINTKDFKEITVEHIKNAVRKIHNWKAPGVDKIHNYYLKYFTSIHKYLALLYTDILNCKEILSDWFTTGYVILIPKNSDTEEPKNWRPIACLPSMYKLLTSILTEELYIHCDMNKILAPEQRGCRRGVRGCKDHLMVNKAVLEDAHQNHKNVSMAWIDYQKAFDSISHSWLLRVLDIYKCPPIIKQFLKAIMPSWRMIMTARGTETTIATEPISVRRGIFQGDSLSPLLFCLAINPLTKLLNQYKTKGYKLKDNTHVNHLLYMDDLKLYANNQNNLQVLLNNTEIFTNDIGMNFGLNKCNILHLTGGRRNNSQGDKHILLSGEVIEHLGINETYKYLGIHESGKIDHEAIREQITKEYFKRIKKLTYSHLNSRNLLKGINTFAVPVLLYSIGVVNFKNSDLKKIDVKTRKLLAIKKIVHQKADIHRLYIPVTEGGRGLINIEYMYKSQIIKYSQYLSNDSDYLIKAVKNHHINKGKYSIIKEAKQYTNELQLITKNTYSDNDIKQAILKIQTAQWRNKNMHGQFPNNVLDRVNIDIQLSFQWIKKHSLSAVLEATIFAIQDQAVVTKQHERDILKRAVDGKCRLCMKKDETVQHLISGCDKLAPNHYVNRHDNLVKYVYWSLLKKHNMNTTNQWWKENLTQPQIQQNDSAKILWELPVHTDMTIPHNRPDLIYVNKHHNKTFLIDVTVPSDYNIGPKEIEKLNRYHSLKIEIDRLWNTQTEIIPIVIGATGVVAKNIIKYCDKLQANIDIGILQKQAAIHSSTIVHKVLSNNIYIKDV

SEQ ID NO: 33350 - protein, 1159 aa, Junonia neildi
MEELMFCYYKAKYEGVGYLSKLQNLFVERNQHNPKISHFNGNTLATQARRIIKLKILSEETLTRIKFNAENSEQKTTERMPQTIDIHEENTSIIHSTQHIQSPLISTVESYTQLITHDTQSSTTPEESMMSHEILTSECQASQNCVENEDPIIIEFLQILAEVKETPVEKRESLPKPKFNKCYFEIFHKINDYLPQLLDNQYSLQNINNIIYAAAKTLIINNNQKTYKSNNTFEKNKKDPPWKCRIKKKIEILRREVGQLIEIGNGINTRKVLKIKDKLYHKYNICNEIDQQNTIEINKQKIKAYAGRLRRYEEMNNRKNQNTSFRDNEHKFYKNLGVKHNTVTKLPTKHEIESFWSDIYSHSISYNSSATWIQELEESCSNINTKDFKEITVEHIKNAVRKIHNGKTPGVDKIHNYYLKYFTSIHKYLALLYTDILNCKEILNDWFTTGYVILIPKNSDTEEPKNWRPIACLPSMYKLLTSILTEELYIHCDINKILAPEQRGCRRGVRGCKDHLMVNKAVLEDAHQNHKNVSMAWIDYQKAFDSISHSWLLRVLDIYKCPPIIKQFLKMIMPSWRMIMTARGTETTIATEPISVRRGIFQGDSLSPLLFCLAINPLTKLLNQYKTKGYKLKDNTHVNHLLYMDDLKLYANNQNNLQVLLNNTEIFTNDIGMNFGLNKCNILHLTGGRRNNSQGDKHILLSGEVIEHLGINETYKYLGIHESGKIDHEAIRDQITKEYFKRIKKLTYSHLNSRNLLKGINTFAVPVLLYSIGVVNFKNSDLKKIDVKTRKLLAIKKIVHQKADIHRLYIPVTEGGRGLINIEYMYKSQIIKYSQYLSNDSDYLIKAVKNHHINKGKYSIIKEAKQYTKELQLLTKNTYSDNDIKQAILKIQKAQWRNKNMHGQFPNNVLDRVNIDIQLSFQWIKKHSLSAVLEATIFAIQDQAVVTKQHERDILKRAVDGKCRLCTKKDETVQHLISGCDKLAPNHYVNRHDNLVKYVYWSLLKKHNMNTTNQWWKENLTQPQIQQNDSAKILWELPVHTDMTIPHNRPDLIYVNKHHNKTFLIDVTVPSDYNIGPKEIEKLNRYHSLKIEIDRLWNTQTEIIPIVIGATGVVAKNIIKYCDKLQANIDIGILQKQAAIHSSTIVHKVLSNNIYIKDV

SEQ ID NO: 33351 - protein, 1259 aa, Junonia evarete
MKRQNKDKRIGPLPGGRRGTFGAGAERDSMRSVSDSQLSRRAGVGVSRNVTAESQLTDDALQSRASANENSAGTSATTTTSLPHTKDKRRKWSQEELEELMYCYYKAKYEGVGYLSKLQNLFMERNPHNPKISNFNGNTLATQARRIVKQKILTEETLTRIKLNAEKSEQEITERLPQIIDINEENISATQTTQQSQISFITNKTLETFTPITIQDTQFDTAQETPANTHERLTPEHQQTLRNSIEDEDPIIIEFLQILTEVKETPVEERNSLPKPKFNKSYFQNFHKINDYIPQLLDNNQHNLQNVNNIIYAAAKTLILSNKQKEYKFDNSLKTNAKDPPWKNRIKKKIEILRREVGQLTEIENGISTRKMLKIKDKLYNKYKINSEIDHQNTVEINKQKIKAYAGRLKRYEEMNNRKNQNTLFHENEHKFYKKLGTKHNTVIKLPTKHEIQEFWTNIYSHPISYNTAATWLRELEDSNSNIDTKNLQEITIEHIRNAVKKIHNWKAPGIDKIHNYYLKYFTNVHKYLALLFTDIINCKEPLHDWFTTGHVILIPKNTNTEEPKNWRPIACLPSMYKLITSILTEELHNHCDVNNVMAPEQRGCRRGVRGCKDHLMINKAILEDAHQYHKNVSMAWIDYQKAFDSISHSWLLKILDIYKCPPIIKQFLEMVMPSWRMIMSARGNETTITTEPIYVRRGIFQGDSLSPLLFCLAINPLSKFLNKYKIKGYKLKDSTHINHLLYMDDLKLYANSQNNLKTLLNNTELFTNDVGMNFGLDKCNILHLKGGRRNSSQGDKHILLSGEVFEHLGTNETYKYLGIHESGKIDHEALRDQITKEYFQRIKKLTYSHLNSRNLIKGINTYAVPVLLYSLGVVNYKNSDLKKIDVRTRKLLAIKKIHHQKADIQRLYLPVAEGGRGLINIEYMYKTQMIKYLQYLTNNTDYLIKSIYEHHVNKTKYSIIKEAKQYVRELQLETKNTYSDREIKQAIIKIQRTQWRNKNMHGQFPNNVLDRVNIDTELSFRWLKKHSLSAILESTVFAIQDQAVVTKQHERDILKRGVDGKCRLCMKKDETVQHLISGCDKLAANHYVNRHDNLVKYIYWSLLKKHNMSTTNQWWKENLAQPQIQQNDSAKILWELPVHTDITIPHNRPDLIYVNKLQNKTFLIDVTVPSDYNIGPKEIEKLNRYHSLKVEIDRLWNTQTTIIPIVVGATGVVAKNIIKYCEKLQANIDIGILQKQAAIHSSTIVHKVLANNIYIKED

SEQ ID NO: 33352 - protein, 1259 aa, Junonia genoveva
MKRQNKDKRIGPLPGGRRGTFGAGAERDSMRSVSDSQLSRRAGVGVSRNVTAESQLTDDALQSRASANENSAGTSATTTTSLPHTKDKRRKWSQEELEELMYCYYKAKYEGVGYLSKLQNLFMERNPHNPKISNFNGNTLATQARRIVKQKILTEETLTRIKLNAEKSEQEITERLPQIIDINEENISATQTTQQSQISFITNKTLETFTPITIQDTQFDTAQETPANTHERLTPEHQQTLRNSIEDEDPIIIEFLQILAEVKETPVEERNSLPKPKFNKSYFQNFHKINDYIPQLLDNNQHNLQNVNNIIYAAAKTLILSNKQKEYKFDNSLKTNAKDPPWKNRIKKKIEILRREVGQLTEIENGISTRKMLKIKDKLYNKYKINSEIDHQNTVEINKQKIKAYAGRLKRYEEMNNRKNQNTLFHENEHKFYKKLGTKHNTVIKLPTKHEIQEFWTNIYSHPISYNTAATWLRELEDSNSNIDTKNLQEITIEHIRNAVKKIHNWKAPGIDKIHNYYLKYFTNVHKYLALLFTDIINCKEPLHDWFTTGHVILIPKNTNTEEPKNWRPIACLPSMYKLITSILTEELHNHCDVNNVMAPEQRGCRRGVRGCKDHLMINKAILEDAHQYHKNVSMAWIDYQKAFDSISHSWLLKILDIYKCPPIIKQFLEMVMPSWRMIMSARGNETTITTEPIYVRRGIFQGDSLSPLLFCLAINPLSKFLNKYKIKGYKLKDSTHINHLLYMDDLKLYANSQNNLKTLLNNTELFTNDVGMNFGLDKCNILHLKGGRRNSSQGDKHILLSGEVFEHLGTNETYKYLGIHESGKIDHEALRDQITKEYFQRIKKLTYSHLNSRNLIKGINTYAVPVLLYSLGVVNYKNSDLKKIDVRTRKLLAIKKIHHQKADIQRLYLPVAEGGRGLINIEYMYKTQMIKYLQYLTNNTDYLIKSIYEHHVNKTKYSIIKEAKQYVRELQLETKNTYSDREIKQAIIKIQRTQWRNKNMHGQFPNNVLDRVNIDTELSFRWLKKHSLSAILESTVFAIQDQAVVTKQHERDILKRGVDGKCRLCMKKDETVQHLISGCDKLAANHYVNRHDNLVKYIYWSLLKKHNMSTTNQWWKENLAQPQIQQNDSAKILWELPVHTDITIPHNRPDLIYVNKLQNKTFLIDVTVPSDYNIGPKEIEKLNRYHSLKVEIDRLWNTQTTIIPIVVGATGVVAKNIIKYCEKLQANIDIGILQKQAAIHSSTIVHKVLANNIYIKED

SEQ ID NO: 33353 - protein, 1159 aa, Junonia vestina
MEELMFCYYKAKYEGVGYLSKLQNLFVERNQHNPKISHFNGNTLATQARRIIKLKILSEETLTRIKFNAENSEQKTTERMPQTIDIHEENTSIIHSTQHIQSPLISTVESYTQLITHDTQSSTTPEESMMSHEILTSECQASQNCVENEDPIIIEFLQILAEVKETPVEKRESLPKPKFNKCYFEIFHKINDYLPQLLDNQYSLQNINNIIYAAAKTLIINNNQKTYKSNNTFEKNKKDPPWKCRIKKKIEILRREVGQLIEIGNGINTRKVLKIKDKLYHKYNICNEIDQQNTIEINKQKIKAYAGRLRRYEEMNNRKNQNTSFRDNEHKFYKNLGVKHNTVTKLPTKHEIESFWSDIYSHSISYNSSATWIQELEESCSNINTKDFKEITVEHIKNAVRKIHNWKAPGVDKIHNYYLKYFTSIHKYLALLYTDILNCKEILNDWFTTGYVILIPKNSDTEEPKNWRPIACLPSMYKLLTSILTEELYIHCDINKILAPEQRGCRRGVRGCKDHLMVNKAVLEDAHQNHKNVSMAWIDYQKAFDSISHSWLLRVLDIYKCPPIIKQFLKMIMPSWRMIMTARGTETTIATEPISVRRGIFQGDSLSPLLFCLAINPLTKLLNQYKTKGYKLKDNTHVNHLLYMDDLKLYANNQNNLQVLLNNTEIFTNDIGMNFGLNKCNILHLTGGRRNNSQGDKHILLSGEVIEHLGINETYKYLGIHESGKIDHEAIRDQITKEYFKRIKKLTYSHLNSRNLLKGINTFAVPVLLYSIGVVNFKNSDLKKIDVKTRKLLAIKKIVHQKADIHRLYIPVTEGGRGLINIEYMYKSQIIKYSQYLSNDSDYLIKAVKNHHINKGKYSIIKEAKQYTKELQLLTKNTYSDNDIKQAILKIQKAQWRNKNMHGQFPNNVLDRVNIDIQLSFQWIKKHSLSAVLEATIFAIQDQAVVTKQHERDILKRAVDGKCRLCTKKDETVQHLISGCDKLAPNHYVNRHDNLVKYVYWSLLKKHNMNTTNQWWKENLTQPQIQQNDSAKILWELPVHTDMTIPHNRPDLIYVNKHHNKTFLIDVTVPSDYNIGPKEIEKLNRYHSLKIEIDRLWNTQTEIIPIVIGATGVVAKNIIKYCDKLQANIDIGILQKQAAIHSSTIVHKVLSNNIYIKDV

SEQ ID NO: 33354 - protein, 1254 aa, Junonia evarete
MKRQNKDKRIGPLPGGRRGTFGAGAERDSMRSVSDSQLSRRAGVGVSRNVTAESQLTDDALQSRASANENSAGTSATTTTSLNTKDKRRKWSQEEMEELMFCYYKAKYEGVGYLSKLQNLFVERNQHNPKISHFNGNTLATQARRIIKLKILSEETLTRIKFNAENSEQKTTERMPQTIDIHEENTSIIHSTQHIQSPLISTVESYTQLITHDTQSSTTPEESMMSHEILTSECQASQNCVENEDPIIIEFLQILAEVKETPVEKRESLPKPKFNKCYFEIFHKINDYLPQLLDNQYSLQNINNIIYAAAKTLIINNNQKTYKSNNTFEKNKKDPPWKCRIKKKIEILRREVGQLIEIGNGINTRKVLKIKDKLYHKYNICNEIDQQNTIEINKQKIKAYAGRLRRYEEMNNRKNQNTSFRDNEHKFYKNLGVKHNTVTKLPTKHEIESFWSDIYSHSISYNSSATWIQELEESCSNINTKDFKEITVEHIKNAVRKIHNWKAPGVDKIHNYYLKYFTSIHKYLALLYTDILNCKEILNDWFTTGYVILIPKNSDTEEPKNWRPIACLPSMYKLLTSILTEELYIHCDINKILAPEQRGCRRGVRGCKDHLMVNKAVLEDAHQNHKNVSMAWIDYQKAFDSISHSWLLRVLDIYKCPPIIKQFLKMIMPSWRMIMTARGTETTIATEPISVRRGIFQGDSLSPLLFCLAINPLTKLLNQYKTKGYKLKDNTHVNHLLYMDDLKLYANNQNNLQVLLNNTEIFTNDIGMNFGLNKCNILHLTGGRRNNSQGDKHILLSGEVIEHLGINETYKYLGIHESGKIDHEAIRDQITKEYFKRIKKLTYSHLNSRNLLKGINTFAVPVLLYSIGVVNFKNSDLKKIDVKTRKLLAIKKIVHQKADIHRLYIPVTEGGRGLINIEYMYKSQIIKYSQYLSNDSDYLIKAVKNHHINKGKYSIIKEAKQYTKELQLLTKNTYSDNDIKQAILKIQKAQWRNKNMHGQFPNNVLDRVNIDIQLSFQWIKKHSLSAVLEATIFAIQDQAVVTKQHERDILKRAVDGKCRLCTKKDETVQHLISGCDKLAPNHYVNRHDNLVKYVYWSLLKKHNMNTTNQWWKENLTQPQIQQNDSAKILWELPVHTDMTIPHNRPDLIYVNKHHNKTFLIDVTVPSDYNIGPKEIEKLNRYHSLKIEIDRLWNTQTEIIPIVIGATGVVAKNIIKYCDKLQANIDIGILQKQAAIHSSTIVHKVLSNNIYIKDV

SEQ ID NO: 33355 - protein, 963 aa, Junonia litoralis
MPQTIDIHEENTSIIHSTQHIQSPLISTVESYTQLITHDTQSSTTPEESMMSHEILTSECQASQNCVENEDPIIIEFLQILAEVKETPVEKRESLPKPKFNKCYFEIFHKINDYLPQLLDNQYSLQNINNIIYAAAKTLIINNNQKTYKSNNTFEKNKKDPPWKCRIKKKIEILRREVGQLIEIGNGINTRKVLKIKDKLYHKYNICNEIDQQNTIEINKQKIKAYAGRLRRYEEMNNRKNQNTSFRDNEHKFYKNLGVKHNTVTKLPTKHEIESFWSDIYSHSISYNSSATWIQELEESCSNINTKDFKEITVEHIKNAVRKIHNWKAPGVDKIHNYYLKYFTSIHKYLALLYTDILNCKEILNDWFTTGYVILIPKNSDTEEPKNWRPIACLPSMYKLLTSILTEELYIHCDINKILAPEQRGCRRGVRGCKDHLMVNKAVLEDAHQNHKNVSMAWIDYQKAFDSISHSWLLRVLDIYKCPPIIKQFLKMIMPSWRMIMTARGTETTIATEPISVRRGIFQGDSLSPLLFCLAINPLTKLLNQYKTKGYKLKDNTHVNHLLYMDDLKLYANNQNNLQVLLNNTEIFTNDIGMNFGLNKCNILHLTGGRRNNSQGDKHILLSGEVIEHLGINETYKYLGIHESGKIDHEAIRDQITKEYFKRIKKLTYSHLNSRNLLKGINTFAVPVLLYSIGVVNFKNSDLKKIDVKTRKLLAIKKIVHQKADIHRLYIPVTEGGRGLINIEYMYKSQIIKYSQYLSNDSDYLIKAVKNHHINKGKYSIIKEAKQYTKELQLLTKNTYSDNDIKQAILKIQKAQWRNKNMHGQFPNNVLDRVNIDIQLSFQWIKKHSLSAVLEATIFAIQDQAVVTKQHERDILKRAVDGKCRLCTKKDETVQHLISGCDKLAPNHYVNRHDNLVKYVYWSLLKKHNMNTTNQWWKENLTQPQIQQNDSAKILWELPVPVA

SEQ ID NO: 33356 - protein, 966 aa, Plutella xylostella
MSQTDCPPSTSNVAPSQELVRCPDCSQPRFFKGQRGLKIHHGKQHRQPSSTQPPPPPAHVPTDHNHSRPAGGGLWKQLAELKSTCPVVARIPRGARNTVAASLSKCIRQTIETNDVSSWEQFFTFSYRTLHVTRDGKSSGSLTQKIKNNCTHPTETDNPHPPSNRLPHRNTAQLVERKINAGDIKGAAQLLFSSDAAAPDTAETLSALESKHPLSSPSSQLPPPPDPTERTPTATVEDVQAAVASFRGGSAGGLDGLSPQHYKDLIFGTTGDTGRVVLESVTQLVNLMLSGKVCTEITDVLYGANLCALKKKDGGIRPIAVGNAIRRVVSKICCKHIAPILSDKFQPTQLGFGSKGGCEAAVHAARAFLTSGAGEVLLKVDVRNAFNSVEREALLTQIKEVVPEIYHYMWQCYGEKTKLVYRNHLLYSAAGCQQGDPLGPAIFSLAIHPVITKIKSKFNVWYLDDGSIGDEASTALQDLDSMIKEFQNIGLELNFSKCELFINPNLPTDKQTDIHSKFNSLAPGIKILNKSSLRLFGSPVLDESIPKYIDDEITKFQESSHRLVQINPQNALVIIRYCLFVPKFTYVLRCSPIWRHQNLLNNLDAMIRNILTEILNCQLDNRSWAQASLPIRFGGLGIRSASSVALPAFLSSAHSTAGLYGKIIYPSLGDAEVTYLAEARSAWSDIAGPQQDVPRLPESQRLWDEPICRQVQENLLETATSPADRARLMASAEPESGHWLRALPSASVGTLLDRNTFNLSVCLRLGCKTNEPHRCRCGDPVDQLGHHGLSCQRSAGRLPRHAALNDVIRRAFASAGIPAILEPTGLARDDGKRPDGMTVMPWKYGKCLVWDATCTDTVAPSHIQGSAAAAGTAAAAAENLKRRKYNGLSDSYIFVPFGVETLGPWGPEARRLVKELSSRLVEVSRDQRAGSYLSQRISLAIQRGNAASLLGTIPGDGSELKEIFYL

SEQ ID NO: 33357 - protein, 1281 aa, Bursaphelenchus xylophilus
MTCNNAVVFPPADGNPAGTADRNFAIRFPSSEPPGPSGIRPSEPLDGRTGIGDVEHAQAGNGGFLVDVLEYKEAHRYGSKCEFCYVQTKGTVCSKPRTDAWLKCEILFLLHHAYTANQNKSIELAESAFRRAGITRRSKATIAKRWSLIQRGKGTDYKEYWDEYFEKFRYECNPTPIVRRKRNRLAAGLQSPSSVPNGYEFERKRTCETPLDTKASSLPLICNLLTGIVGVENVEENMSVECTEPKELSGTANSSVPGLAEGVYERRHNNVNEPAAGCPQDVPVANNLIDSPTTNDRLEAEFKAQLDRAERSYMRRRLPRLKNLSPDERMWIGTTVERLRLETVSEPVCEQWRLANAGLYAAIRSIAVMRPLDAAREAHKTWLLNMKMTERKLRQQIGWVETTRRTKNEARTERQEIVYRKVAKLRRERFPEMDLDSVSVHLKRKLELLKGRIQVRTAERLRRDTREAAGPYGKTALRGQGFAPNVKDATQYWSGLAQPSGQKCSENSAILSDWKELVECNLSSLPDQMEPLVVQGISRASPWKSPGPDGIFNYYWRQDFIVDWLKQLMLDSLRTGHYPWKLSSGRTVLLYKDGDPTKAENYRPITCLNGCFKMINSVVSEVILKRVENTIALPIEQMALRRKVWACVESQIWDQIKQRKLSDRTQKCKVAWVDFSKAYDSLNHDAIKFVIGVLKLPTGINNYLLDSMQNWSTHLELKSSGKVVRGPSYPIKRGVLQGDSLSPTLFVVVTSIIVRHIKTIESSDIQMYMDDIKLYGKDQETLTRLIKELQTVSNKLGLCMNLKKCAILGDDLPEEINGIEHLKESYKYLGVPQREITQVRATMAALEKKILTEVDTSLGAAELSYRQRISRVNSKIAPLVRFVVQSMLVTPRDVLKVYNRLGGIDVEIRRRLVKYEIRYKKSNVARLYLDRKVGGIGFVNLCRIMVEAVAARAVYCRLAPSFNEFQDFLAEQNTSPITAAQTILDKCGINIELSTSTLGDVKKIVRNHYHELWLTAWKNTGLYKRWENDHVDIKRSSLWINRGNLSANNARIGIGIQDNSIFCRGFVGNKCDTKYCRLCGDGIESVSHIVTGCPTHRTNLYIERHDCVARNVYAYLAIRYGIPVPHYTQRVKTIEKNGDQSVELYWNYKFPCTRALEACRPDIVLIDKVSKRTHIIEVAVSWRGRLQEMVDRKVYKYTVNGEYEADGSSRGWNIVRELNDQYGFPVEVYTLVIGAGGEILPCTVKDVERLTGGAATDNLIERMERSAVLGSCRIIKRHLAL

SEQ ID NO: 33358 - protein, 846 aa, Trachelipus rathkii
MFKQDPGRLYRKLRNDEIRVTEPPRKEEIERVWKNIYEDERQHNNEAEWKEEIINDPQINGINEMECGEISQKEVKDVLVKLNNWKAPGPDKVQNVWLKKVTVLISPLTKCINRLLNGREAIPEWLTIGDTNLIPKSEETKNPTKYRPITCLPTIYKTLTSIIASRIYKHVENNNIINEEQKGCIRNSMGTKDQLLINKMILENSWRNQKHLSMTWIDYKKAYDSVPHSWILEVLKIYKINKKIVDFVKEGMRQWRVNLKLKYEKGLIELEKINIKRGIFQGDSLSPLLFILAINPLSNLINKLQNGYRINPRNEKSSKLISHLFYMDDLKLYAPNRQETIKQVEVVKKFSEDICMEFGLDKCAFLTLRKGRRTESENITIDDTVIRQLEQENTYKYLGVEESEKVEHKLMKEKLEKEYLKRTKAILKSELSAKNKIEAIKTLAVPVILYSCGVIDWFQEDLNRIDINRKMLNAHKMIYRGQILSRLYTERREGGMGLVEIDYIYKREIIGLGQYLESAENKFLQWVYQHERGKPTTTSLIKKKTDYMNANNIRVEQGQRWEERTQKEKTKILKDKFEAERKKKHINQWRQQAMAKEYKKIIDESYIDKEKSVEILTRGRLQAEEERVIIAAQDRTIRTRWHRKHIERENISDICRVCERDTESVPHILAGCQILLERKLYTERHNTICKLIHFKLCQKYNIRTEAVNYWKHNPPEIEENEEVLLLYDSVIPTDVAVTHNRPDIVVKDKRHQKCYIIEVGVPNDNNVVAYEIEKEVKYQRLKHEIRRMWNTNDIVVIPIIVGNLGVIKKSLIKHLEKLPVSVNTLEMSVMVVRKSIAILRLVLGFG

SEQ ID NO: 33359 - protein, 1145 aa, Armadillidium nasatum
MIQENRGELYQGNRKKKEQTTKTNKNRKRNEERNEVKEKYSTCNSPPSEKDEEDGEETETVSEVRVWITEKPEDELMEPGNEESSVSELHDSTQESLNIEQSDSDESRRNERRNEQFQYTREELEGMLQKIAHYREIDLNEGMGKRLRINKINNYFEMNKQIGIANRVLPRILPSDCDITELNRLYYAVGRAIGDIMGVGVMKETGGTRKKKCKPWKFRLEKEILKIRREISILTSFQQNRLRSERVIRQVQNIIRRERVRQGNKLVHAIARRKLSLMAKSKRLKRYERNEKEKEQNRMFKQDPGRLYRQLRNDEIKVNEIPKKEEIERFWKNIYEKEKRHNRVTEWKEQIINSPQVNNINEMECREISQREVKEVLIKLNNWKAPGPDKVQNIWLKKVTVLMVPLTKCLNKLLEEGEAMPEWMTIGDTNLIPKSKETKNSSNYRPITCLPTMYKTLTAIIASRIYNHIENNNIINEEQKGCIRNSMGTKDQLLINKMILENSWKNQKHLSMAWIDYKKAYDSVPHSWILEVLKIYKVSDKIVNFVKEGMKQWKVNLKLKHEKGAIEINKINIKRGIFQGDSLSPLLFILAINPLSNLINNLQNGYRVNPRSEKSAKIISHLFYMDDLKLYAPNRQEITKQIEVVKKFSKDICMEFGLEKCAFLTLKKGRRIESENITIEEITIRQLEQERTYKYLGVEESEKVEHKLMKENLGKEYLKRTKAILRSELNARNKVEAIKTLAIPVILYSSGIIDWFQEDLNKLDIATRKMLNANKMIYKGQILSRMYTERKEGGMGLVEIDYIYKREIIGLGQYLENTENKYLQWVHDHERIKPAISSLIKKKDDYLNMYQINVERSERWEEKTQKEKIRIVKDKFEEKRKAKHINQWKQQVIAKEYKEIIDEVYIDKEKSVEIFCKGGLQAEEERMIRAAQDGLVRTRWRRKHIEREDISDACRICQLHPETVPHILSACEILLSRGTYTDRHDAICKIIHFKLCRKYNITTEAPNYWKHNPPEIVENNQALILYDCPIPTDIRVAHNRPDIVIKDKTERKCYIIEVGVPFDNNLAAYEREKEIKYIRLKQEMRRMWNIDNISIIPIVVGAMGVIKKSLIEQLNRLPISITSLELTKTVVKKSISILRLVLGGG

SEQ ID NO: 33360 - protein, 847 aa, Trachelipus rathkii
MFKQDPGRLYRKLRNDEIRVTEPPRKEEIERVWKNIYEDERQHNNEAEWKEEIINDPQINGINEMEFGEISQKEVKDVLVKLNNWKAPGPDKVQNVWLKKVTVLISPLTKCINRLLNGREAIPEWLTIGDTNLIPKSEETKNPTKYRPITCLPTIYKTLTAIIASRIYKHVENNNIINEEQKGCIRNSMGTKDQLLINKMILENSWRNQKHLSMTWIDYKKAYDSVPHSWILEVLKIYKINKKIVDFVKEGMRQWRVNLKLKYEKGLIELEKINIKRGIFQGDSLSPLLFILAINPLSNLINKLQNGYRINPRNEKSSKLISHLFYMDDLKLYAPNRQETIKQVEVVKKFSEDICMEFGLDKCAFLTLRKGRRTESENITIDDTVIRQLEQENTYKYLGVEESEKVEHKLMKEKLEKEYLKRTKAILKSELSAKNKIEAIKTLAVPVILYSCGVIDWFQEDLNRIDIKTRKMLNAHKMIYRGQILSRLYTERREGGMGLVEIDYIYKREIIGLGQYLESAENKFLQWVYQHERGKPTTTSLIKKKTDYMNANNIRVEQGQRWEERTQKEKTKILKDKFEAERKKKHINQWRQQAMAKEYKKIIDESYIDKEKSVEILTRGRLQAEEERVIIAAQDRTIRTRWHRKHIERENISDICRVCERDTESVPHILAGCQILLERKLYTERHNTICKLIHFKLCQKYNIRTEAVNYWKHNPPEMEENEEVLLLYDSVIPTDVAVAHNRPDIVVKDKRHQKCYIIEVGVPNDNNVVAYEIEKEVKYQRLKHEIRRMWNTNDIVVIPIIVGNLGVIKKSLIKHLEKLPVSVNTLEMSVMVVRKSIAILRLVLGFG

SEQ ID NO: 33361 - protein, 868 aa, Armadillidium nasatum
MAKSKRLKRYERNEKEKEQNRMFKQDPGRLYRQLRNDEIKVNEIPKKEEIERFWKNIYEKEKRHNRVTEWKEQIINSPQVNNINEMECREISQREVKEVLIKLNNWKAPGPDKVQNIWLKKVTVLMVPLTKCLNKLLEEGEAMPEWMTIGDTNLIPKSKETKNSSNYRPITCLPTMYKTLTAIIASRIYSHIENNNIINEEQKGCIRNSMGTKDQLLINKMILENSWKNQKHLSMAWIDYKKAYDSVPHSWILEVLKIYKVSDKIVNFVKEGMKQWKVNLKLKHEKGAIEINKINIKRGIFQGDSLSPLLFILAINPLSNLINNLQNGYRVNPRSEKSAKIISHLFYMDDLKLYAPNRQEITKQIEVVKKFSKDICMEFGLEKCAFLTLKKGRRIESENITIEEITIRQLEQERTYKYLGVEESEKVEHKLMKENLGKEYLKRTKAILRSELNARNKVEAIKTLAIPVILYSSGIIDWFQEDLNKLDIATRKMLNANKMIYKGQILSRMYTERKEGGMGLVEIDYIYKREIIGLGQYLENTENKYLQWVHDHERIKPAISSLIKKKDDYLNMYQINVERSERWEEKTQKEKIRIVKDKFEEKRKAKHINQWKQQVIAKEYKEIIDEVYIDKEKSVEIFCKGGLQAEEERMIRAAQDGLVRTRWRRKHIEREDISDACRICQLHPETVPHILSACEILLSRGTYTDRHDAICKIIHFKLCRKYNITTEAPNYWKHNPPEIVENNQALILYDCPIPTDIRVAHNRPDIVIKDKTERKCYIIEVGVPFDNNLAAYEREKEIKYIRLKQEMRRMWNIDNISIIPIVVGAMGVIKKSLIEQLNRLPISITSLELTKTVVKKSISILRLVLGGG

SEQ ID NO: 33362 - protein, 1505 aa, Trachelipus rathkii
MLTFSLVGEISAMGRPRFGFSNPKRLGRRYGGLHVVERTNCKNWIKTMRRNKKEKHCQGIGSPGAGPSSLGERGEGGRSSDERITLSLEHRNQTKKGLRATKTQAQLPPGESSDESETSPDSPEHQSNRKKYDPYNRRGALRMSYTVEEKLEIFWCVTYSRHSTFPKKDTSKRARAMLRQRNIIDKEKLEKIPDARFLSIATNVRNGKTVITEERRAQVEEEVEEYIRLINTTDDHINPSDEKWIWTSERNKYLMECYYIGELIPEKKEKTEFWKYIVEEKVISAIDYMEYRFKQKYNQIDRKKMVNQKQAILNYNKERNEEGKKKKKATLPTSEDLKNIKEQAREIMEKDLQLTPETIQKIQENRGALYQGNRKIKEGKKTKTNKSLEGEKESIETEEIYFTHNTLPLRDIEDSKEETEIEDVVDLWITEKSDNELMELENESEESESEEEVEEQMNMEQNIEENGRNERENEETQYTREQLDGMLQKIAHYREIDLIEGIEKRLRIKKINNFFELNKQIGIVNRVLPRIVPIDCDVTELNRLYYSVARAIADNMGVGVMKETRGTGNERIKPPWKIRLEKEILKLRKEISNLTSFQGGQLRSEAVRRRVQNIIRRERVRQGNKLIHAITRRKLNLAAKSKRLRRYERNEKQKEQNRMFKQDPGRLYRKLRNDEIKVTEPPRKEEIERVWKNIYENERHHNNEAEWKEEIVNDPQINNINEMEFGEISQKEVKDVLVKLNNWKAPGPDKVQNVWLKKVTVLISPLTKCINRLLNGREAIPEWLTIGDTNLIPKSEETKNPTKYRPITCLPTTYKTLTAIIASRIYKHVENNNIINEEQKGCIRNSMGTKDQLLINKMILENSWRNQKHLSMTWIDYKKAYDSVPHSWILEVLKIYKINKKIVDFVKEGMRQWRVNLKLKYEKGLIELEKINIKRGIFQGDSLSPLLFILAINPLSNLINKLQNGYRINPRNEKSSKLISHLFYMDDLKLYAPNRQETIKQVEVVKKFSEDICMEFGLDKCAFLTLRKGRRTESENITIDDTIIRQLEQENTYKYLGVEESEKVEHKLMKEKLEKEYLKRTKAILKSELSAKNKIEAIKTLAVPVILYSCGVIDWFQEDLNRIDIKTRKMLNAHKMIYRGQILSRMYTERREGGMGLVEIDYIYKREIIGLGQYLESAENKFLQWVYQHERGKPTTTSLIKKKTDYMNANNIRVEQGLRWEEKTQKEKTKILKDKFEAERKKKHINQWRQQAMAKEYKKIIDESYIDKEKSVEILTRGRLQAEEERVIIAAQDRTIRTRWHRKHIERENISDICRMCERDTESVPHILAGCQILLERKLYTERHNTICKLIHFKLCQKYNIRTEAANYWKHNPPEMEENEEVLLLYDSVIPTDVAVTHNRPDIVVKDKRDQKCYIIEVGVPNDNNVVAYEREKEIKYQRLKHEIRRMWNTNDIVVIPIIVGTLGVIKKSLIKHLEKLPVSVNTLEMSVMVVRKSIAILRLVLGFG

SEQ ID NO: 33363 - protein, 1063 aa, Trachelipus rathkii
MNEESESDEGIEEPLNIEQNNNEENIRNEGENEETQYTREQLDGMLQKIAHYREIDLLEGIDKRLRINKINDYFGMNKQIGIVNRVLPRILPIDCDITELNRLYYAVGRAIADNMGVGVMKEGRGTGIKRIKHWKLRLQKEIQKLREEISILTSFQGGQLRSEAVRRRVQNIIRRERVRQGNKLIHAITRRKLNLAAKSKRLKRYERNEKQKEQNRMFKQDPGRLYRKLRNDEIKVTEPPRKEEIERVWKNIYENERHHNNEAEWKEEIVNDPQINNIDEMEFGEISQKEVKDVLVKLNNWKAPGPDKVQNVWLKKVTVLISPLTKCINRLLNGREAIPEWLTIGDTNLIPKSEETKNPTKYRPITCLPTIYKTLTSIIASRIYKHVENNNIINEEQKGCIRNSMGTKDQLLINKMILENSWRNQKHLSMTWIDYKKAYDSVPHSWILEVLKIYKINKKIVDFVKEGMRQWRVNLKLKHEKGLIELEKINIKRGIFQGDSLSPLLFILAINPLSNLINKLQNGYRINPRNEKSSKLISHLFYMDDLKLYAPNRQETIKQVEVVKKFSEDICMEFGLDKCAFLTLRKGRRTESENITIDDTIIRQLEQENTYKYLGVEESEKVEHKLMKEKLEKEYLKRTKAILKSELSAKNKIEAIKTLAVPVILYSCGVIDWFQEDLNRIDIKTRKMLNAHKMIYRGQILSRMYTERREGGMGLVEIDYIYKREIIGLGQYLESAENKFLQWVYQHERGKPTTTSLIKKKTDYMNANNIRVEQGQRWEEKTQKEKTKILKDKFEAERKKKHINQWRQQAMAKEYKKIIDESYIDKEKSVEILTRGRFQAEEERVIIAAQDRTIRTRWHRKHIERENISDICRMCERDTESVPHILAGCKTLLEKKIYTERHNTICQLIHFKLCQKYNIRTEAVNYWKHNPPEIEENEEVLLLYDSVIPTDVAVTHNRPDIVVKDKRDQKCYIIEVGVPNDNNVVAYEIEKEVKYQRLKHEIRRMWNTNDIVVIPIIVGTLGVIKKSLIKHLEKLPVSVNTLELSLMVVRKSIAILRLVLGFG

SEQ ID NO: 33364 - protein, 949 aa, Trachelipus rathkii
MGVGVMKEGRGTGIKRIKHWKLRLQKEIQKLREEISILTSFQGGQLRSEAVRRRVQNIIRRERVRQGNKLIHAITRRKLNLAAKSKRLKRYERNEKQKEQNRMFKQDPGRLYRKLRNDEIKVTEPPRKEEIERVWKNIYENERHHNNEAEWKEEIVNDPQINNIDEMEFGEISQKEVKDVLVKLNNWKAPGPDKVQNVWLKKVTVLISPLTKCINRLLNGREAIPEWLTIGDTNLIPKSEETKNPTKYRPITCLPTIYKTLTSIIASRIYKHVENNNIINEEQKGCIRNSMGTKDQLLINKMILENSWRNQKHLSMTWIDYKKAYDSVPHSWILEVLKIYKINKKIVDFVKEGMRQWRVNLKLKHEKGLIEVEKININRGIFLGDSLFPLLFILAINPLSNLINKLQNGYRINPRNEKSSKLISHLFYMDDLKLYAPNRQETIKQVEVVKKFSEDICMEFGLDKCAFLTLRKGRRTESENITIDDTIIRQLEQENTYKYLGVEESEKVEHKLMKEKLEKEYLKRTKAILKSKLSAKNKIEAIKTLAVPVILYSCGVIDWFQEDLNRIDIKTRKMLNAHKMIYRGQILSRMYTERREGGMGLVEIDYIYKREIIGLGQYLESAENKFLQWVYQHERGKPTTTSLIKKKTDYMNANNIRVEQGQRWEEKTQKEKTKILKDKFEAERKKKHINQWRQQAMAKEYKKIIDESYIDKEKSVEILTRGRFQAEEERVIIAAQDKTIRTRWHRKHIERENISDICRMCERDTESVPHILAGCKTLLEKKIYTERHNTICQLIHFKLCQKYNIRTEAVNYWKHNPPEIEENEEVLLLYDSVIPTDVAVTHNRPDIVVKDKRDQKCYIIEVGVPNDNNVVAYEIEKEVKYQRLKHEIRRMWNTNDIVVIPIIVGTLGVIKKSLIKHLEKLPVSVNTLEMSVMVVRKSIAILRLVLGFG

SEQ ID NO: 33365 - protein, 1288 aa, Trachelipus rathkii
MLRQRNIIDKEKLEKIPDARFLSIATNVRNGKTVITEERRAQVEEEVEEYIRLINTTDDHINPSDEKWIWTSERNKYLMECYYIGELIPEKKEKTEFWKYIVEEKVISAIDYMEYRFKQKYNQIDRKKMVNQKQAILNYNKERNEEGKKKKKATLPTSEDLKNIKEQAREIMEKDLQLTPETIQKIQENRGALYQGNRKIKEGKKTKTNKSLEGEKESIETEEIYVTHNTLPLRDIENSKEETEIEDVVDLWITEKSDNELMELENESEESESEEEVEKHMNMEQNIEENGRNERENEETQYTREQLDGMLQKIAHYREIDLIEGIEKRLRIKKINNFFELNKQIGIVNRVLPRIVPIDCDVTELNRLYYSVGRAIADNMGVGVMKETRGTGNERIKHWKLRLQKEIQKLREEISILTSFQGGQLRSEAVRRRVQNIIRRERVRQGNKLIHAITRRKLNLAAKSKRLRRYERNEKQKEQNRMFKQDPGRLYRKLRNDEIKVTEPPRKEEIERVWKNIYENERHHNNEAEWKEEIVNDPQINNINEMEFGEISQKEVKDVLVKLNNWKAPGPDKVQNVWLKKVTVLISPLTKCINRLLNGREAIPEWLTIGDTNLIPKSEETKNPTKYRPITCLPTIYKTLTSIIASRIYKHVENNNIINEEQKGCIRNSMGTKDQLLINKMILENSWRNQKHLSMTWIDYKKAYDSVPHSWILEVLKIYKINKKIVDFVKEGMRQWRVNLKLKYEKGLIELEKINIKRGIFQGDSLSPLLFILAINPLSNLINKLQNGYRINPRNEKSSKLISHLFYMDDLKLYAPNRQETIKQVEVVKKFSEDICMEFGLDKCAFLTLRKGRRTESENITIDDTIIRQLEQENTYKYLGVEESEKVEHKLMKEKLEKEYLKRTKAILKSELSAKNKIEAIKTLAVPVILYSCGVIDWFQEDLNRIDIKTRKMLNAHKMIYRGQILSRMYTERREGGMGLVEIDYIYKREIIGLGQYLESAENKFLQWVYQHERGKPTTTSLIKKKTDYMNANNIRVEQGQRWEEKTQKEKTKILKDKFEAERKKKHINQWRQQAMAKEYKKIIDESYIDKEKSVEILTRGRFQAEEERVIIAAQDKTIRTRWHRKHIERENISDICRMCERDTESVPHILAGCKTLLEKKIYTERHNTICQLIHFKLCQKYNIRTEAVNYWKHNPPEMEENEEVLLLYDSVIPTDVAVTHNRPDIVVKDKRDQKCYIIEVGVPNDNNVVAYEREKEVKYQRLKHEIRRMWNTNDIVVIPIIVGTLGV

SEQ ID NO: 33366 - protein, 1032 aa, Armadillidium nasatum
MLTHTNVREELEGMLQKIAHYREIDLNEGMGKRLRINKINNYFEMNKQIGIANRVLPRILPSDCDITELNRLYYAVGRAIGDIMGVGVMKETGGTRKKKCKPWKFRLEKEILKIRREISILTSFQQNRLRSERVIRQVQNIIRRERVRQGNKLVHAIARRKLSLMAKSKRLKRYERNEKEKEQNRMFKQDPGRLYRQLRNDEIKVNEIPKKEEIERFWKNIYEKEKRHNRVTEWKEQIINSPQVNNINEMECREISQREVKEVLIKLNNWKAPGPDKVQNIWLKKVTVLMVPLTKCLNKLLEEGEAIPEWMTIGDTNLIPKSKETKNSSNYRPITCLPTMYKTLTAIIASRIYSHIENNNIINEEQKGCIRNSMGTKDQLLINKMILENSWKNQKHLSMAWIDYKKAYDSVPHSWILEVLKIYKVSDKIVNFVKEGMKQWKVNLKLKHEKGAIEINKINIKRGIFQGDSLSPLLFILAINPLSNLINNLQNGYRVNPRSEKSAKIISHLFYMDDLKLYAPNRQEITKQIEVVKKFSKDICMEFGLEKCAFLTLKKGRRIESENITIEEITIRQLEQERTYKYLGVEESEKVEHKLMKENLGKEYLKRTKAILRSELNARNKVEAIKTLAIPVILYSSGIIDWFQEDLNKLDIATRKMLNANKMIYKGQILSRMYTERKEGGMGLVEIDYIYKREIIGLGQYLENTENKYLQWVHDHERIKPAISSLIKKKDDYLNMYQINVERSERWEEKTQKEKIRIVKDKFEEKRKAKHINQWKQQVIAKEYKEMIDEVYIDKEKSVEIFCKGGLQAEEERMIRAAQDGLVRTRWRRKHIEREDISDACRICQLHPETVPHILSACEILLSRGTYTDRHDAICKIIHFKLCRKYNITTEAPNYWKHNPPEIVENNQALILYDCPIPTDIRVAHNRPDIVIKDKTERKCYIIEVGVPFDNNLAAYEREKEIKYIRLKQEMRRMWNIDNISIIPIVVGAMGVIKKSLIEQLNRLPISITSLELTKTVVKKSISILRLVLGGG

SEQ ID NO: 33367 - protein, 1482 aa, Trachelipus rathkii
MIGERKATVVVLSRRANRHQLRKLMNRKNMKKTCQEIGSPGAGPSSLGERGEGGRSSDERITLSLEHRNQTKKGLRATKTQAQLPPGESSDESLTSPDSPEHQSNRKKYDPYNRRGALRMSYTVEEKLEIFWCVTYSRHSTFPKKDTSKRARAMLRQRNIIDKEKLEKIPDARFLSIATNVRNGKTVITEERRAQVEEEVEEYIRLINTTDDHINPSDEKWIWTSERNKYLMECYYIGELIPEKKEKTEFWKYIVEEKVISAIDYMEYRFKQKYNQIDRKKMVNQKQAILNYNKERNEEGKKKKKATLPTSEDLKNIKEQAREIMEKDLQLTPETIQKIQENRGALYQGNRKIKERKKTRANKSLEGEKESNEIEEIYGTHNTLPLRDIEDNKEETEIVDVVELWIAEKPDNELMESENENEASESDEGTEEPMNIEQNNNEENIRNEGENEETQYTREQLDGMLQKIAHYREIDLLEGIDKRLRINKINDYFGMNKQIGIVNRVLPRILPIDCDITELNRLYYAVGRAIADNMGVGVMKERRGTGIKRIKHWKLRLQKEIQKLREEISILTSFQGGQLRSEAVRRRVQNIIRRERVRQGNKLIHAITRRKLNLAAKSKRLRRYERNEKQKEQNRMFKQDPGRLYRKLRNDEIKVTEPPRKEEIERVWKNIYENERHHNNEAEWKEEIVNDPQINNIDEMEFGEISQKEVKDVLVKLNNWKAPGPDKVQNVWLKKVTVLISPLTKCINRLLNGREAIPEWLTIGDTNLIPKSEETKNPTKYRPITCLPTIYKTLTSIIASRIYKHVENNNIINEEQKGCIRNSMGTKDQLLINKMILENSWRNQKHLSMTWIDYKKAYDSVPHSWILEVLKIYKINKKIVDFVKEGMRQWRVNLKLKYEKGLIELEKINIKRGIFQGDSLSPLLFILAINPLSNLINKLQNGYRINPRNEKSSKLISHLFYMDDLKLYAPNRQETIKQVEVVKKFSEDICMEFGLDKCAFLTLRKGRRTENENTTIDDTIIRQLEQENTYKYLGVEESEKVEHKLMKEKLEKEYLKRTKAILKSELSAKNKIEAIKTLAVPVILYSCGVIDWFQEDLNRIDIKTRKMLNAHKMIYKGQILSRMYTERREGGMGLVEIDYIYKREIIGLGQYLESAENKFLQWVYQHERGKPTTTSLIKKKTDYMNANNIRVEQGQRWEEKTQKEKTKILKDKFEAERKKKHINQWRQQAMAKEYKKIIDESYIDKEKSVEILTRGRFQAEEERVIIAAQDKTIRTRWHRKHIERENISDICRMCERDTESVPHILAGCKTLLERKIYTERHNTICQLIHFKLCQKYNIRTEAVNYWKHNPPEMEENEEVLLLYDSVIPTDVAVTHNRPDIVVKDKRDQKCYIIEVGVPNDNNVVAYEREKEVKYQRLKHEIRRMWNTNDIVVIPIIVGTLGVIKKSLIKHLEKLPVSVNTLEMSVMVVRKSIAILRLVLGFG

SEQ ID NO: 33368 - protein, 1505 aa, Trachelipus rathkii
MLTFSLVGEISAMGRPRCGFSNPKRLGRRYGGLHVMERTNCKNWIKTMRRNKKEKHCQGIGSLGAGPSSLGEGGEGGRSSDERITLSLEHRNQTKKGLRATKTQAQLPPGESSDESKTSPDSPEHQSNRKKYDPYNRRGAFRMSYTVEEKLEIFWCVTYSRHSTFPKKDTSKRARAMLGQRNIIDKEKLEKIPDARFLSIATNVRNGKTVITEERRAQVEEEVEEYIRLINTTDDHINPSDGKWIWTSERNKYLMECHYIGELIPEKKEKTEFWKYIVEEKVISANDYMEYRFKQKYNQIDRKKMVNQKQAILNYNKERNEEGKKKKKATLPTSEDLKNIKEQAREIMEKDLQLTPETIQKIQENRGALYQGNRKIKEGKKTKTNKSLEGEKESIETEEIYFTHNTLPLRDIENSKEETEIEDVVDLWITEKSDNELMELENESEESESEEEAEEHMNMEQNIEENGRNERENEETQYTREQLDGMLQKIAHYREIDLIEGIEKRLRIKKINNFFELNKQIGIVNRVLPRIVPIDCDVTELNRLYYSVGRAIADNMGVGVMKETRGTGNERIKPPWKIRLEKEILKLRKEISNLTSFQRGQLRSEIVKRQVQNIIRRERVRQGNKLIHAITRRKLSLAAKSKRFRRYERNEKQKEQNQMFKQDPGRLYRKLRNDEIRVTEPPRKEEIERVWKNIYEDERQHNNEAEWKEEIINDPQINGINEMEFGEISQKEVKDVLVKLNNWKAPGPDKVQNVWLKKVTVLISPLTKCINRLLNGREAIPEWLTIGDTNLIPKSEETKNPTKYRPITCLPTIYKTLTAIIASRIYKHVENNNIINEEQKGCIRNSMGTKDQLLINKMILENSWRNQKHLSMTWIDYKKAYDSVPHSWILEVLKIYKINKKIVDFVKEGMRQWRVNLKLKYEKGLIELEKINIKRGIFQGDSLSPLLFILAINPLSNLINKLQNGYRINPRNEKSSKLISHLFYMDDLKLYAPNRQETIKQVEVVKKFSEDICMEFGLDKCAFLTLRKGRRTESENITIDDTVIRQLEQENTYKYLGVEESEKVEHKLMKEKLEKEYLKRTKAILKSELSAKNKIEAIKTLAVPVILYSCGVIDWFQEDLNRIDIKTRKMLNAHKMIYRGQILSRLYTERREGGMGLVEIDYIYKREIIGLGQYLESAENKFLQWVYQHERGKPTTTSLIKKKTDYMNANNIRVEQGQRWEERTQKEKTKILKDKFEAERKKKHINQWRQQAMAKEYKKIIDESYIDKEKSVEILTRGRLQAEEERVIIAAQDRTIRTRWHRKHIERENISDICRMCERDTESVPHILAGCQILLERKLYTERHNTICKLIHFKLCQKYNIRTEAVNYWKHNPPEIEENEEVLLLYDSVIPTDVAVTHNRPDIVVKDKRDQKCYIIEVGVPNDNNVVAYEIEKEVKYQRLKHEIRRMWNTNDIVVIPIIVGNLGVIKKSLIKHLEKLPVSVNTLEMSVMVVRKSIAILRLVLGFG

SEQ ID NO: 33369 - protein, 868 aa, Armadillidium nasatum
MAKSKRLKRYERNEKEKEQNRMFKQDPGRLYRQLRNDEIKVNEIPKKEEIERFWKNIYEKEKRHNRVTEWKEQIINSPQVNNINEMECREISQREVKEVLIKLNNWKAPGPDKVQNIWLKKVTVLMVPLTKCLNKLLEEGEAIPEWMTIGDTNLIPKSKETKNSSNYRPITCLPTMYKTLTTIIASRIYSHIENNNIINEEQKGCIRNSMGTKDQLLINKMILENSWKNQKHLSMAWIDYKKAYDSVPHSWILEVLKIYKVSDKIVNFVKEGMKQWKVNLKLKHEKGAIEINKINIKRGIFQGDSLSPLLFILAINPLSNLINNLQNGYRVNPRSEKSAKIISHLFYMDDLKLYAPNRQEITKQIEVVKKFSKDICMEFGLEKCAFLTLKKGRRIESENITIEEITIRQLEQERTYKYLGVEESEKVEHKLMKEKLGKEYLKRTKAILRSELNARNKVEAIKTLAIPVILYSSGIIDWFQEDLNKLDIATRKMLNANKMIYKGQILSRMYTERKEGGMGLVEIDYIYKREIIGLGQYLENTENKYLQWVYDHERIKPAISSLIKKKDDYLNMYQINVERSERWEEKTQKEKIRIVKDKFEEKRKAKHINQWKQQVIAKEYKEIIDEVYIDKEKSVEIFCKGGLQAEEERMIRSAQDGLVRTRWRRKHIEREDISDACRICQLHPETVPHILSACEILLSRGTYTDRHDAICKIIHFKLCRKYNITTEAPNYWKHNPPEIVENNQALILYDCPIPTDIRVAHNRPDIVIKDKTKRKCYIIEVGVPFDNNLAAYEREKEIKYIRLKQEMRRMWNIDNISIIPIVVGAMGVIKKSLIEQLNRLPISITSLELTKAVVKKSISILRLVLGGG

SEQ ID NO: 33370 - protein, 893 aa, Trachelipus rathkii
MIRRERVIQGDKMVHAIARRKLNLAAKSKKLRRYEKNEKEKIQNRMFHQDQGRLYRELKNDNITVKNPPKKEEVDQFWRNIYEDNREHNAQADWINEIANNQIINNIDRMRFPPIVKKEVKQVIKNFGNWKAPGPDKVHNIWLKKITSLMEPLVKCLNRLVEGEEPLPEWLTTGDTVLIPKSIETKNPSKYRPITCLPTVYKTLTGVISNRVYEHAETNNIINEEQKGCVRNAYGTKDQLLINKMVMENSRQKQKHLSMAWIDYQKAYDSVPHSWIKEILKIYKISDTVINFIDRGMEQWKVNLKLNHEKGCMKIKNVRIRRGIFQGDSLSPLLFILAINPLSNLINNIENGYRINPRNEKKPKIISHLFYMDDLKLYSPNREETTRQIEIVKKFSDDINMKFGLDKCAFLSLKKGRRVESENIMLDQTTITQLQQENTYKYLGIEESEKIEHKKMKEKLKKEFLKRTKLILKSELTAKNKVEAIKTFAVPVILYSCGIIDWYQEDLNQLDISARKMLNAHKMIYKGQILSRLYTDRKEGGLGMVELDQQVYKKEIIGIGEYLESSAKKFIQWVCLHERNKPDSTSIIKKKRDYMRAHNITTDQVQGWEEKTTKIRMKYLKDRYGENRKQKHLNQWKSQAMAKQYKELLGEVYIDEDKSVEIFSKGILRSEEERIVTAAQDRTLRTRWHRKHIEKENITDICRVCKKDTESVSHILAGCQVLLKSHRYTERHNTICSLIHFKLCQKYKIRLEVTSYWKHNPPEIEENEEALILYDCAIPTDIAVTHNRPDIVVKDKREQKCYIIEVGVPLDNNLVAYELEKELKYQRLKHEIRRMWNIEDIIVIPIVVGALEVIKKSLLEHLKKLPVSVTSLELSKMVIKKSIALLRLVLGCG

SEQ ID NO: 33371 - protein, 1168 aa, Trachelipus rathkii
MSKESLYSTKSKTCEKEHTGSKKKSTDGNYKKQRNKKEEKENRDEVIFLNINSHHSVDEDQKENQEEEERMIEGNLYEEPLGELKDIPNNDSLVNVSEDSIQDLSNISNHEEEDNENRDRNEATVYTREQIDEMLQKIAHYREEDLLIGFDKRQKIKKIHNWYKLNKNIGLANRALARILPLDCDITELNRLYYATGRAIADIMDTGVVKETEIKGMIRKPPWKFRLEKEIQKLREEISILTAYQRNELRVEITKRQAENMIRRERVIQGDKMVHAIARRKLNLAAKSKKLRRYEKNEKEKIQNRMFHQDQGRLYRELKNDNITVKNPPKKEEVDQFWRNIYEDNREHNAQADWINEIANNQIINNIDRMRFPPIVKKEVKQVIKNFGNWKAPGPDKVHNIWLKKITSLMEPLVKCLNRLVEGEEPLPEWLTTGDTVLIPKSIETKNPSKYRPITCLPTVYKTLTGVISNRVYEHAETNNIINEEQKGCVRNAYGTKDQLLINKMVMENSRQKQKHLSMAWIDYQKAYDSVPHSWIKEILKIYKISDTVINFIDRGMEQWKVNLKLNHEKGCMKIKNVRIRRGIFQGDSLSPLLFILAINPLSNLINNIENGYRINPRNEKKPKIISHLFYMDDLKLYSPNREETTRQIEIVKKFSDDINMEFGLDKCAFLSLKKGRRVESENIMLDQTTITQLQQESTYKYLGIEESEKIEHKKMKEKLKKEFLKRTKLILKSELTAKNKVEAIKTFAVPVILYSCGIIDWYQEDLNQLDISARKMLNAHKMIYKGQILSRLYTDRKEGGLGMVELDQVYKKEIIGIGEYLESSAKKFIQWVCLHERNKPDSTSIIKKKRDYMRTRNVTTDQVQGWKEKTTKMRMKYLKDRYGENRKQKHLNQWKSQAMAKQYKELLGEVYIDGDKSVEIFSKGILRSEEERIVTAAQDRTLRTRWHRKHIEKENISDRCRVCEQDTESVSHILAGCPVLLKSHRYTERHNTICSLIHFKLCQKYKIRLEVTSYWKHNPPEIEENEEALILYDCAIPTDIAVTHNRPDIVVKDKREQKCYIIEVGVPLDNNLVAYELEKELKYQRLKHEIRRMWNIENIIVIPIVVGALGVIKKSLLEHLKKLPVSITSLELSKMVIKKSIALLRLVLGLGTDRWNWNFAGLTPGLL

SEQ ID NO: 33372 - protein, 892 aa, Armadillidium nasatum
MVRRERVNQGNKIIHAIARRKLNLAAKSKRLRRYEKNEKEKSQNRIFKQDPGRLYREFRGDNITVKEPPKKEEVERFWKNIYENNIPHNNQACWKNEIVNSQIIHNINRMNITEIDQREVRQVIRNFGNWKTPGPDKVHNVWIKKITILIQPLTRCLNRLLEGEEALPEWLTTGDTILIPKSNETKNASKYRPITCLPTIYKTLTAILSNRLYEHVDTNNIINEEQKGCIRNTCGTKDQLLINKMVLENSRQKQKHLSMAWIDYQKAYDSVPHSWIKEVLNIYKVNPTIVDFISKGMEQWKVNLRLRHEKGCMEIKNIKIKRGIFQGDSLSPLLFILAINPLSNLIKNLENGYRINARNEKKAKIISHLFYMDDLKLYAPNREETTRQIAMVKQFSDDINMQFGLDKCAFITLRKGRRVESENIIMDQTTISQLDQESTYKYLGIEESEKVEHKKMKERLKKEYLKRIKLILKSELKAKNKIEAIRTFAVPVILYSCGIIDWYQEDLNQLDISTRKMLNAHKMIYKGQILSRIYTERVEGGMGMIELDQVYKKEIIGIGEYLEGATGKFIQWVYLHEINKPDTTSIIKKKRDYLHSHNITTNQVQGWEEKILKFKMKYLKDRYGQERKQKHLNQWKNQAMAKKYRELLEEIYIDKEKSVEIFSKGELNAEDERMIMAAQDLTLRTKWFRKHIEGENISDKCRVCDQDTESVPHILAGCQTLLNRHLYTERHNTICKLIHFKLCQKYNIRTESTNYWKHNPPEIEENEEVLLLYDCTIPTDVHVTHNRPDIIVKDKREQRCYIIEVGVPNDNNLVAYEREKEIKYQRLKNEIRRMWDMNDIIVIPIVVGTLGVIKRSLMEHLKKLPVVINTLELSKMVVKKSISILRLVLSFG

SEQ ID NO: 33373 - protein, 1082 aa, Trachelipus rathkii
MIEGNLYEEPIGELKDIPNNDSLVNVSEDSIQDISNISNHEEEDNENRDRNEATVYTREQIDEMLQKIAHYREEDLLIGFDKRQKIKKIHNWYKLNKNIGLANRALARILPLDCDITELNRLYYATGRAIADIMDTGVVKETEIKGMIRKPPWKFRLEKEIQKLREEISILTAYQRNELRVETTKRQAENMIRRERVIQGDKMVHAIARRKLNLAAKSKKLRRYEKNEKEKIQNRMFHQDQGRLYRELKNDNITVKNPPKKEEVDQFWRNIYEDNREHNAQADWINEIANNQIINNIDRMRFPRTGKKEVRHVIKNFGNWKTPGPDSVHNVWLKKITSLMEPLVKCLNRLVEGEEPLPEWLTTGDTVLIPKSIETKNPSKYRPITCLPTVYKTLTGVISNRVYEHAETNNIINEEQKGCVRNAYGTKDQLLINKMVMENSRQKQKHLSMAWIDYQKAYDSVPHSWIKEILKIYKISDTVINFIDRGMEQWKVNLKLNHEKGCMKIKNVRIRRGIFQGDSLSPLLFILAINPLSNLINNIENGYRINPRNEKKPKIISHLFYMDDLKLYSPNREETTRQIEIVKKFSDDINMEFGLDKCAFLSLKKGRRVESENIMLDQTTITQLQQESTYKYLGIEESEKIEHKKMKEKLKKEFLKRTKLILKSELTAKNKVEAIKTFAVPVILYSCGIIDWYQEDLNQLDISARKMLNAHKMIYKGQILSRLYTDRKEGGLGMVELDQVYKKEIIGIGEYLESSAKKFIQWVCLHERNKPDSTSIIKKKRDYMRAHNITTDQVQGWEEKTTKIRMKYLKDRYGENRKQKHLNQWKSQAMAKQYKELLGEVYIDGDKSVEIFSKGILRSEEERIVTAAQDRTLRTRWHRKHIEKENITDICRVCKQDTESVSHILAGCQVLLKSHRYTERHNTICSLIHFKLCQKYKIRLEVTSYWKHNPPEIEENEEELILYDCAIPTDIAVTHNRPDIVVKDKREQKCYIIEVGVPLDNNLVAYELEKELKYQRLKHEIRRMWNIENIIVIPIVVGALGVIKKSLLEHLKKLPVSITSLELSKMVIKKSIALLRLVLGCG

SEQ ID NO: 33374 - protein, 940 aa, Cotesia glomerata
MNIELIKFFPDRTLQSIKSKRAAADYKKLVQNYIDELNSSQTPKEAPSEATFTDDSFFLSEPPVVDEPGPNNTNEANEKFYKEVIEYLQALPPSDSNNCNTTRLNQIVESLGIWTRDRVFAELSLYLRENFVCQATERNKCREAPARKCTRRQERKEQYAKVQKAWKKNRSRCIKDLLKSKRTNMAPPKERMIPFWETIMNSGGTSSPGVQPAEKIYEELWSPITPREIKAAFPPNGTSPGPDGLSVRNLKKVPIGVWTKILNILMLVGKLPQHLLESRTTLIPKKDGAAEPGEFRPITVSSTITRTFHKVLANRLSNSIPLDPRQKAFRPVDGCAENIFTMDFILKYTRRNFKPLYLATLDVAKAYDSVTHQTIMDTLTTAGVPDLMIKYIREVYEHSTTRIQCNGWTSDEIKPTCGVKQGDPLSPILFNMVIDRLFAILPKEVGIRVGNQVVNVIGYADDLVLFATTKVGLQTILDASANYLHECGLHINSSKCSTVSVKTVPKEKKVAIDANETFTCFGQPIPALKRSDQWKYLGVPFSPEGRLTVKPLDKLNADIETLKKAPLKSQQRLFALRAHVLPGLYHLLVLGSTNLSLLNKLDITVRAAVRKWLDLPKDVPNAYFHADVKDGGLSIPSFRWTAPLQRLNRLRNLQKSEGHTEAPQAMEAFREKEIKQAQERLKDQGGFINSLTTYKARFARILHQSNDGKPLIRSSDVIQQHRWVTDGNLLLSGREFVNMNKLRINAVPLKVRTSRGRIKRETDCRGGCKQTETLEHVLQTCHRTHAPRIQRHDNCLNYILKKLPKICKVHEEPKFKTPEGLKKPDAIIIRGEEAILIDAQIVGERADLDRQFRTKKEKYQILTGDIMNRYSVKHVTFTALTISSRGIWSKQSYEHLTKLNLIKNSDVKLLSIKVLTGGMKSINIFNTTTAMRRRTQDDHG

SEQ ID NO: 33375 - protein, 756 aa, Cotesia chilonis
MAPPKERMIPFWETIMNSGGTSSPGVQPAEKTYEELWSPITPREIKAAFPPNGTSPGPDGLSVRNLKKVPIGMLTKILNILMLVGKLPQHLLESRTTLIPKKDDATEPGLFRPITVSSTITRTFHKVLANRLSNNIPLDPRKKAFRPVDGCAENIFTMDFILKYTRRNFKPLYLATLDVAKAYDSVTHQTIMDTLTTAGVPDLMIKYIREVYEHSTTRIQCNGWTSDEIKPTCGVKQGDPLSPILFNMVIDRLFSILPEEVGIRVGNQVVNVIGYADDLVLFATTKVGLQTILDASANYLHKCGLHINSSKCSTVSMKTVPKEKKVAIDANETFTCFGQPIPALKRSDQWKYLGVPFSPEGRLTAKPQDKLNADIETLRKAPLKSQQRLFALRAHVLPGLYHLLVLGSTNLSLLNKLDITVRAAVRKWLDLPKDAPNAYFHADVKDGGLSIPSFRWTAPLQRLNRLRNLQKSEGHTEAPQAMEAFLETEIKQAQERLKDQGDFINSLTACKARFARILHQSNDGKPLIRSSDVIQQHRWVTDGNLLLSGREFVHMNKLRINAIPLRVRTSRGRIKRETDCRGGCKQTETLEHVLQVCHRTHAPRIQRHNNCLNYILKKLPKICKVYEEPKFKTPEGLKKPDAIIIRGEEAILIDAQVVGERGDLDKQFRIKREKYKILTGNIMNRYSVKNVTFTALTISSRGIWSKQSYEHLTKLNLIKNSDVKLLSIKVLTGGMKSINIFNSTTATRRRTHDDHG

SEQ ID NO: 33376 - protein, 940 aa, Cotesia vestalis
MNIELIKFFPDRTLQSIKSKRAAADYKKLVQNYIDELSSSQIPEEAPSEATFTDDSSSSPESLVVDEPASNNTNEANEKFYKEVIEYLQALPPSDSNNCNTTRLNQIVESLGIWTRDRIFVEISLYLRENFVRQSTERNKCGETPTRKRTKRQERKEQYAKVQKAWKKNRSRCIKDLLKSKRTDMAPPKERMIPFWETIMTSGGTSSPGVKPTERTYEELWSPITPREIKAAFPPNGTSPGPDGLSVRNLKKVPIGVWTKILNILMLVGKLPQHLLESRTTLIPKKDGAAEPGDFRPITVSSTITRTFHKVLANRLSINIPLDPRQKAFRPVDGCAENIFTMDFILKYTRRNFKPLYLATLDVAKTYDSVTHQTIMDTLTTAGVPDLMIKYIREVYEHSTTRIQCNGWTSDEIKPTCGVKQGDPLSPILFNMVIDRLFSILPKEVGIRVGNQVVNVIGYADDLVLFATTKVGLQTILDASANYLHECGLHINSSKCSTVSVKTVPKEKKVAIDANETFTCFGQPIPALKRSDQWKYLGVPFSPEGRLTVKPLDKLNADIETLRKAPLKSQQRLFALRAHVLPGLYHLLVLGSTNLSLLNKLDITVRAAVRKWLDLPKDVPNAYFHADVKNGGLSIPSFRWIAPLQRLNRLRNLQKSEGYTEAPQAMEAFLEIEIKQAQERLKDQGDFINSLTACKARFARILHQSNDGKPLIRSSDVIQQHRWVTDGNLLLSGREFVHMNKLRINAIPLKVRTSRGRIKRETDCRGGCKQTETLEHVLQVCHRTHAPRIQRHNNCLNYILKKLPKICKVHEEPKFKTPEGLKKPDAIIIRGEEAILIDAQIVGEKTDLDRQFRTKREKYQVLTGDIMNRYSVKHVTFTALTISSRGIWSKQSYEHLTKLNLIKNSDVKLLSIKVLTGGIKSINIFNSTTATRRRTHDDHG

SEQ ID NO: 33377 - protein, 8 aa, synthetic construct
GSGGGSGS

SEQ ID NO: 33378 - protein, 8 aa, synthetic construct
GSGGGGSG

SEQ ID NO: 33379 - protein, 12 aa, synthetic construct
FNCGKEGHTARN

SEQ ID NO: 33380 - protein, 5 aa, synthetic construct
GGGGS

SEQ ID NO: 33381 - protein, 50 aa, synthetic construct
  VARIANT 1..50: note = This sequence may encompass 1-10 GGGGS repeating units
GGGGSGGGGSGGGGSGGGGSGGGGSGGGGSGGGGSGGGGSGGGGSGGGGS

SEQ ID NO: 33382 - protein, 55 aa, synthetic construct
GGGGSGGGGSGGGGSGGGGSGGGGSGGGGSGGGGSGGGGSGGGGSGGGGSGGGGS

SEQ ID NO: 33383 - protein, 30 aa, synthetic construct
  VARIANT 1..30: note = This sequence may encompass 1-10 GGS repeating units
GGSGGSGGSGGSGGSGGSGGSGGSGGSGGS

SEQ ID NO: 33384 - protein, 33 aa, synthetic construct
GGSGGSGGSGGSGGSGGSGGSGGSGGSGGSGGS

SEQ ID NO: 33385 - protein, 4 aa, synthetic construct
SGGS

SEQ ID NO: 33386 - protein, 40 aa, synthetic construct
  VARIANT 1..40: note = This sequence may encompass 1-10 SGGS repeating units
SGGSSGGSSGGSSGGSSGGSSGGSSGGSSGGSSGGSSGGS

SEQ ID NO: 33387 - protein, 44 aa, synthetic construct
SGGSSGGSSGGSSGGSSGGSSGGSSGGSSGGSSGGSSGGSSGGS

SEQ ID NO: 33388 - protein, 5 aa, synthetic construct
EAAAK

SEQ ID NO: 33389 - protein, 50 aa, synthetic construct
  VARIANT 1..50: note = This sequence may encompass 1-10 EAAAK repeating units
EAAAKEAAAKEAAAKEAAAKEAAAKEAAAKEAAAKEAAAKEAAAKEAAAK

SEQ ID NO: 33390 - protein, 55 aa, synthetic construct
EAAAKEAAAKEAAAKEAAAKEAAAKEAAAKEAAAKEAAAKEAAAKEAAAKEAAAK

SEQ ID NO: 33391 - DNA, 50 bp, synthetic construct
  source 1..50: mol_type = other DNA
attcaatgaagcgcgggtaaacggcgggagtaactatgactctcttaagg

SEQ ID NO: 33392 - DNA, 30 bp, synthetic construct
  source 1..30: mol_type = other DNA
acggcgggagtaactatgactctcttaagg

SEQ ID NO: 33393 - DNA, 175 bp, synthetic construct
  source 1..175: mol_type = other DNA
gtctagttacaactgggcatcgctgcagagatcgcacctcctcgtggtcccgctggtagcccttcgaagggtgactaagtcgatctctgccccaggtacggagccgttgggactcaccagtccaacgtaactcctgcctaaattcggtgaaacaaattcctcggtaaaaagcccc

SEQ ID NO: 33394 - DNA, 15 bp, synthetic construct
  source 1..15: mol_type = other DNA
gtctagttacaactg

SEQ ID NO: 33395 - DNA, 230 bp, synthetic construct
  source 1..230: mol_type = other DNA
tctagttacaactgggcatagctgcagagatctcacctcctcgtggtcccgctggtaagcccttaacagggtgactaagtagatctctgccccagtcaaggagccgctgggaatcaccagcccagcgattcctttcaaatttaggtgaaacaaatttctcggtgtgggtcgcaagacttactacctaaaacctggccccacggtctgacaggggcaacgggttcggagat

SEQ ID NO: 33396 - DNA, 15 bp, synthetic construct
  source 1..15: mol_type = other DNA
tctagttacaactgg

SEQ ID NO: 33397 - DNA, 85 bp, synthetic construct
  source 1..85: mol_type = other DNA
tcggcgatgctgaaccacctcctcgtggtgccgactgggcagctttggagaaatcctaagctggctaagagttcagcaactcctg

SEQ ID NO: 33398 - DNA, 65 bp, synthetic construct
  source 1..65: mol_type = other DNA
gttgacgcgatgtgatttctgcccagtgctctgaatgtcaaagtgaagaaattcaatgaagcgcg

SEQ ID NO: 33399 - DNA, 65 bp, synthetic construct
  source 1..65: mol_type = other DNA
attcaatgaagcgcgggtaaacggcgggagtaactatgactctcttaaggtctagttacaactgg

SEQ ID NO: 33400 - DNA, 65 bp, synthetic construct
  source 1..65: mol_type = other DNA
atgactctcttaaggtctagttacaactgggcatcgctgcagagatcgcacctcctcgtggtccc

SEQ ID NO: 33401 - DNA, 65 bp, synthetic construct
  source 1..65: mol_type = other DNA
cgctgcagagatcgcacctcctcgtggtcccgctggtagcccttcgaagggtgactaagtcgatc

SEQ ID NO: 33402 - DNA, 65 bp, synthetic construct
  source 1..65: mol_type = other DNA
gtagcccttcgaagggtgactaagtcgatctctgccccaggtacggagccgttgggactcaccag

SEQ ID NO: 33403 - DNA, 65 bp, synthetic construct
  source 1..65: mol_type = other DNA
cccaggtacggagccgttgggactcaccagtccaacgtaactcctgcctaaattcggtgaaacaa

SEQ ID NO: 33404 - DNA, 65 bp, synthetic construct
  source 1..65: mol_type = other DNA
gactcaccagtccaacgtaactcctgcctaaattcggtgaaacaaattcctcggtaaaaagcccc

SEQ ID NO: 33405 - DNA, 100 bp, synthetic construct
  source 1..100: mol_type = other DNA
agggccggttaatgtggctctggttctgggtacttttatctgtcccctccaccccacagtggggccactagggacaggattggtgacagaaaagccccat

SEQ ID NO: 33406 - DNA, 100 bp, synthetic construct
  source 1..100: mol_type = other DNA
ccttaggcctcctccttcctagtctcctgatattgggtctaacccccacctcctgttaggcagattccttatctggtgacacacccccatttcctggagc

SEQ ID NO: 33407 - DNA, 50 bp, synthetic construct
  source 1..50: mol_type = other DNA
tcctgagtcgtgctgcgtcgacaacggtagtgacgcgtattgcctggagg

SEQ ID NO: 33408 - DNA, 50 bp, synthetic construct
  source 1..50: mol_type = other DNA
gcggacgccggcattcgccgcgtggttcccagcgacctgtatcccctcgt

SEQ ID NO: 33409 - DNA, 50 bp, synthetic construct
  source 1..50: mol_type = other DNA
gccatggcgactgcgacccccgtgccgccgcggatgggcagccgcgctgg

SEQ ID NO: 33410 - DNA, 50 bp, synthetic construct
  source 1..50: mol_type = other DNA
cggccccaccacgccgctgagccccacgcgcctgtcgcggctccaggaga

SEQ ID NO: 33411 - DNA, 50 bp, synthetic construct
  source 1..50: mol_type = other DNA
gaggacatcgatgtcacctccaatgactagggtgggcaaccacaaaccca

SEQ ID NO: 33412 - DNA, 50 bp, synthetic construct
  source 1..50: mol_type = other DNA
cgagggcagagtgctgcttgctgctggccaggcccctgcgtgggcccaag

SEQ ID NO: 33413 - DNA, 21 bp, synthetic construct
  source 1..21: mol_type = other DNA
gaaggaggaggcctaaggatg

SEQ ID NO: 33414 - DNA, 21 bp, synthetic construct
  source 1..21: mol_type = other DNA
gctgtcccctccaccccacag

SEQ ID NO: 33415 - DNA, 21 bp, synthetic construct
  source 1..21: mol_type = other DNA
gatatcaggagactaggaagg

SEQ ID NO: 33416 - DNA, 21 bp, synthetic construct
  source 1..21: mol_type = other DNA
gagggccggttaatgtggctc

SEQ ID NO: 33417 - DNA, 21 bp, synthetic construct
  source 1..21: mol_type = other DNA
gctagtggccccactgtgggg

SEQ ID NO: 33418 - DNA, 20 bp, synthetic construct
  source 1..20: mol_type = other DNA
gaaggaggaggcctaaggat

SEQ ID NO: 33419 - DNA, 20 bp, synthetic construct
  source 1..20: mol_type = other DNA
ggaaggaggaggcctaagga

SEQ ID NO: 33420 - DNA, 20 bp, synthetic construct
  source 1..20: mol_type = other DNA
gtcccctccaccccacagtg

SEQ ID NO: 33421 - DNA, 21 bp, synthetic construct
  source 1..21: mol_type = other DNA
gactaggaaggaggaggccta

SEQ ID NO: 33422 - DNA, 20 bp, synthetic construct
  source 1..20: mol_type = other DNA
gagtcgtgctgcgtcgacaa

SEQ ID NO: 33423 - DNA, 21 bp, synthetic construct
  source 1..21: mol_type = other DNA
gcggtagtgacgcgtattgcc

SEQ ID NO: 33424 - DNA, 21 bp, synthetic construct
  source 1..21: mol_type = other DNA
gtagtgacgcgtattgcctgg

SEQ ID NO: 33425 - DNA, 20 bp, synthetic construct
  source 1..20: mol_type = other DNA
gacgcgtattgcctggagga

SEQ ID NO: 33426 - DNA, 20 bp, synthetic construct
  source 1..20: mol_type = other DNA
gcgtattgcctggaggatgg

SEQ ID NO: 33427 - DNA, 20 bp, synthetic construct
  source 1..20: mol_type = other DNA
gcctggaggatggcggacgc

SEQ ID NO: 33428 - DNA, 20 bp, synthetic construct
  source 1..20: mol_type = other DNA
gccggcgtccgccatcctcc

SEQ ID NO: 33429 - DNA, 20 bp, synthetic construct
  source 1..20: mol_type = other DNA
gggaaccacgcggcgaatgc

SEQ ID NO: 33430 - DNA, 21 bp, synthetic construct
  source 1..21: mol_type = other DNA
gacaggtcgctgggaaccacg

SEQ ID NO: 33431 - DNA, 21 bp, synthetic construct
  source 1..21: mol_type = other DNA
gacgaggggatacaggtcgct

SEQ ID NO: 33432 - DNA, 21 bp, synthetic construct
  source 1..21: mol_type = other DNA
gcacgaggggatacaggtcgc

SEQ ID NO: 33433 - DNA, 21 bp, synthetic construct
  source 1..21: mol_type = other DNA
gagccgagcacgaggggatac

SEQ ID NO: 33434 - DNA, 20 bp, synthetic construct
  source 1..20: mol_type = other DNA
gctgtctccgccgcccgcca

SEQ ID NO: 33435 - DNA, 21 bp, synthetic construct
  source 1..21: mol_type = other DNA
gctgcgacccccgtgccgccg

SEQ ID NO: 33436 - DNA, 20 bp, synthetic construct
  source 1..20: mol_type = other DNA
gacccccgtgccgccgcgga

SEQ ID NO: 33437 - DNA, 21 bp, synthetic construct
  source 1..21: mol_type = other DNA
gacccccgtgccgccgcggat

SEQ ID NO: 33438 - DNA, 21 bp, synthetic construct
  source 1..21: mol_type = other DNA
gccgcggatgggcagccgcgc

SEQ ID NO: 33439 - DNA, 21 bp, synthetic construct
  source 1..21: mol_type = other DNA
gcggatgggcagccgcgctgg

SEQ ID NO: 33440 - DNA, 21 bp, synthetic construct
  source 1..21: mol_type = other DNA
gtggggctcagcggcgtggtg

SEQ ID NO: 33441 - DNA, 21 bp, synthetic construct
  source 1..21: mol_type = other DNA
gcgtggggctcagcggcgtgg

SEQ ID NO: 33442 - DNA, 20 bp, synthetic construct
  source 1..20: mol_type = other DNA
gacaggcgcgtggggctcag

SEQ ID NO: 33443 - DNA, 20 bp, synthetic construct
  source 1..20: mol_type = other DNA
ggagccgcgacaggcgcgtg

SEQ ID NO: 33444 - DNA, 21 bp, synthetic construct
  source 1..21: mol_type = other DNA
gtggagccgcgacaggcgcgt

SEQ ID NO: 33445 - DNA, 21 bp, synthetic construct
  source 1..21: mol_type = other DNA
gccttctcctggagccgcgac

SEQ ID NO: 33446 - DNA, 20 bp, synthetic construct
  source 1..20: mol_type = other DNA
gggcaaccacaaacccacga

SEQ ID NO: 33447 - DNA, 21 bp, synthetic construct
  source 1..21: mol_type = other DNA
gaagcagcactctgccctcgt

SEQ ID NO: 33448 - DNA, 21 bp, synthetic construct
  source 1..21: mol_type = other DNA
gcaagcagcactctgccctcg

SEQ ID NO: 33449 - DNA, 21 bp, synthetic construct
  source 1..21: mol_type = other DNA
gcttgggcccacgcaggggcc

SEQ ID NO: 33450 - DNA, 21 bp, synthetic construct
  source 1..21: mol_type = other DNA
gtccagcttgggcccacgcag

SEQ ID NO: 33451 - DNA, 20 bp, synthetic construct
  source 1..20: mol_type = other DNA
gtccagcttgggcccacgca

SEQ ID NO: 33452 - DNA, 20 bp, synthetic construct
  source 1..20: mol_type = other DNA
gagtggccagagtccagctt

SEQ ID NO: 33453 - DNA, 62 bp, synthetic construct
  source 1..62: mol_type = other DNA
acactctttccctacacgacgctcttccgatctccaggtaagtatcaaggttacaagacagg

SEQ ID NO: 33454 - DNA, 63 bp, synthetic construct
  source 1..63: mol_type = other DNA
acactctttccctacacgacgctcttccgatctaccaggtaagtatcaaggttacaagacagg

SEQ ID NO: 33455 - DNA, 64 bp, synthetic construct
  source 1..64: mol_type = other DNA
acactctttccctacacgacgctcttccgatctgaccaggtaagtatcaaggttacaagacagg

SEQ ID NO: 33456 - DNA, 65 bp, synthetic construct
  source 1..65: mol_type = other DNA
acactctttccctacacgacgctcttccgatcttgaccaggtaagtatcaaggttacaagacagg

SEQ ID NO: 33457 - DNA, 54 bp, synthetic construct
  source 1..54: mol_type = other DNA
gtgactggagttcagacgtgtgctcttccgatctctggtgagtcccaacggctc

SEQ ID NO: 33458 - DNA, 59 bp, synthetic construct
  source 1..59: mol_type = other DNA
gtgactggagttcagacgtgtgctcttccgatctcacagatcgacctgtggagagaaag

SEQ ID NO: 33459 - DNA, 53 bp, synthetic construct
  source 1..53: mol_type = other DNA
gtgactggagttcagacgtgtgctcttccgatctgagggatctgcggccgctt

SEQ ID NO: 33460 - DNA, 57 bp, synthetic construct
  source 1..57: mol_type = other DNA
acactctttccctacacgacgctcttccgatctccgagctgggaccaccttatattc

SEQ ID NO: 33461 - DNA, 56 bp, synthetic construct
  source 1..56: mol_type = other DNA
gtgactggagttcagacgtgtgctcttccgatctcgttggcaagccctttgaggca

SEQ ID NO: 33462 - DNA, 56 bp, synthetic construct
  source 1..56: mol_type = other DNA
gtgactggagttcagacgtgtgctcttccgatctccctcccaggatcctctctggc

SEQ ID NO: 33463 - DNA, 55 bp, synthetic construct
  source 1..55: mol_type = other DNA
acactctttccctacacgacgctcttccgatctcaatgacgtaacacaggcccgc

SEQ ID NO: 33464 - DNA, 59 bp, synthetic construct
  source 1..59: mol_type = other DNA
gtgactggagttcagacgtgtgctcttccgatcttcctgtcgctttggcgaacttattg

SEQ ID NO: 33465 - DNA, 56 bp, synthetic construct
  source 1..56: mol_type = other DNA
gtgactggagttcagacgtgtgctcttccgatctcgagcacgaggggatacaggtc

SEQ ID NO: 33466 - DNA, 21 bp, synthetic construct
  source 1..21: mol_type = other DNA
cccaccccacgtctcgtcgcg

SEQ ID NO: 33467 - DNA, 22 bp, synthetic construct
  source 1..22: mol_type = other DNA
ccgaagtggtagaagccgtagc

SEQ ID NO: 33468 - DNA, 21 bp, synthetic construct
  source 1..21: mol_type = other DNA
gcccgcaccttcagcctgcgc

SEQ ID NO: 33469 - DNA, 29 bp, synthetic construct
  source 1..29: mol_type = other DNA
tccgatctgccgggggcctcccacttatt

SEQ ID NO: 33470 - DNA, 29 bp, synthetic construct
  source 1..29: mol_type = other DNA
ccaggtaagtatcaaggttacaagacagg

SEQ ID NO: 33471 - DNA, 29 bp, synthetic construct
  source 1..29: mol_type = other DNA
ccacctggccctggatcttgctggcaaag

SEQ ID NO: 33472 - DNA, 41 bp, synthetic construct
  source 1..41: mol_type = other DNA
taaggagaccaatagaaactgggcttgtcgagacagagaag

SEQ ID NO: 33473 - DNA, 28 bp, synthetic construct
  source 1..28: mol_type = other DNA
caccggccttattccaagcggcttcggc

SEQ ID NO: 33474 - DNA, 19 bp, synthetic construct
  source 1..19: mol_type = other DNA
tggagcccaccctttccgt

SEQ ID NO: 33475 - DNA, 21 bp, synthetic construct
  source 1..21: mol_type = other DNA
tccttatcacggtcccgctcg

SEQ ID NO: 33476 - DNA, 18 bp, synthetic construct
  source 1..18: mol_type = other DNA
gcattgccacgaagcagg

SEQ ID NO: 33477 - DNA, 17 bp, synthetic construct
  source 1..17: mol_type = other DNA
gaactccacgccgttca

SEQ ID NO: 33478 - DNA, 15 bp, synthetic construct
  source 1..15: mol_type = other DNA
  modified_base 1: mod_base = OTHER; note = 56-carboxyfluorescein-ccatgaaga-ZEN quencher attached to thymine
  modified_base 15: mod_base = OTHER; note = adenosine-3' Iowa Black FQ
tcgagtgccgcatca

SEQ ID NO: 33479 - protein, 1074 aa, unidentified
MTTHRAEVTTSGKTQEEPGPEATHSAQSLLVSPTPAAGRSPATQSCPQVTAAHNSPQSPQSQQVAVTRSDCVPLAQPRIQWPQSSKKAEWLQFDKDVNQILEVTGKGGVDQRLSTMTTLIVNIAAERFGTVTPKPTPSTYTPSHRVKEIKRLRKELKLLKRQYKAAGEVERAGLEDLRGILRKQLVNLCRAEYHRKRRRERARKRAAFLANPFKLTKQLLGQKRTGKLTCSKEAINNHLKATYSDPNREQPLGPCGALLTPPEPTSEFNMKEPCRSEVEEVVRRARSSSAPGPSGVPYKVYKNCPKLLHRLWKALKVIWRRGKIAQPWRYAEGVYIPKEEKSENIDQFRVISLLSVESKIFFSIVAKRLSNFLLSNKYIDTSMQKGGIPGVPGCLEHTGVVTQLIREAREGRGDLAVLWLDLTNAYGSIPHKLVEVALEKHHVPQKVKDLIIDYYSKFSLRVSSGQLTSDWHQLEVGIITGCTISVTLFALAMNMMVKAAETECRGPLSKSGVRQPPIRAFMDDLTVTTTSVPGARWILQGLERLVAWARMSFKPAKSRSLVLRKGKVRDEFRFRLGQHQIPSVTERPVKSLGKAFNCSLNDRDSIRETSTAMEAWLKAVDKSGLPGRFKAWVYQHGILPRLLWPLLIYEVPMTVVEGFEQKVSSYLRRWLGLPRSLSNIALYGNTNKLKLPFGSVREEFIVARTREHLQYSGSRDAKVSGAGIVIRTGRKWRAAEAVEQAETRLKHKAILGAVAQGRAGLGSLAATRYDSASGRERQRLVQEEVRASVEEERTSRAVAMRQQGAWMKWEQAMERNVTWKDIWTWNPLRIRFLIQGVYDVLPSPSNLYIWGRVETPACPLCSKPGTLEHILSSCSKALGEGRYRWRHDQVLKSIAEAISKGIKDSRYRQATAKVIQFIKEGQRPERTAKNCSAGLLSTARDWVMTVDLERQLKIPPHITQSTLRPDIILVSEATKQLILLELTVPWEERMEEAQERKRGKYQELVEQCRANGWRTRCMPVEVGSRGFASYTLSKAYGTLGITGTNRRRALSNNVEAAEKASRWLWLKRGEQWGQ

SEQ ID NO: 33480 - protein, 1062 aa, unidentified
MGLTTPPGFIVLVTIETENDISPGVPTPAYTSTQEGRAELACGSCGKICKSKAGLVSHRKVHVQGNANSQSGCPFTDVDRTCRICDRQFSSKSGLTQHKRHRHPEARNQEKLSCMKTAGSHWTEQESTALLRIATKLAPTCSNLRSLYCRLEHDFPGRSACSIKTRLRTLNWKPTRVTLPDDVCVASQESTNNDTQRIEWASKTVDVAIRQLKDSPQESLRSADLLAMAESFQRGAIDSQQLLSLLEMHAVSTFPHRWRMNTKGHARRANATYKNRKQIRRANYASLQALYHQRRKDAATAVFSGTWKDAHLSTRGLPDNSDKYWQDILSAPSHCDNRPCRSVTPIDWSLIEPIHHEEVTSAVKQMGNTAPGLDKIRPAELKHYSSKALAGYFNLLLLSEGCPEHLCLSRITLVPKVPNPSCPSELRPIAVSSSIIRCFHKIIADRWNSRLSLPSLQFAFLKRDGCLEATSTLHAILRHSCSTGSGLSVAFIDVAKAFDSVSHETIIRSAKAFGAPPPLTQYLTTSYERAAAAISTSTVKCHRGVRQGDPLSPLLFIMAMDEVLSSSMPQLGYQFHDTLVDGFAYADDLIIMAENLPRLQEKLDAASVALGFAGMKINAKKTKLLDIRGARKPYVTATCETPVSFQNEEIKPLSSTETLTYLGIPFTSKGKASINHRRQLQEVLSQIRKAPLKPQQRLELTREHLIPKYTHTLVLGNAHRNTLKRMDNAIRQSLRDWLRLPPDTPTAYFHTACSLGGLGVPCLSTTIPLYKKTRMEKLLTATCPVLRNVVNSGSFKPIIKELSIPIRVHGTIVTDKEGAREAWHEHLLSSVDGRGLRDVAKSPLSNAWLIRPERIFPRIFLRAVHLRCNLLRTKVRSARGGRGDQSVLCRGNCGQPESLAHILQSCWVTHDARCARHNRVAKELARRLRKLGYSVFEELRVPTSHSFIKPDLIVVQDTSAFVLDVSIVGDGRMQSAWSEKVEKYSTEAHTAAISSMLSSIGKPVEHVFHEPVIFSFRGVCYSRSVKSIIRLGLPRYSISDLCLLTIIGSLRTYDTFMRGTWK

SEQ ID NO: 33481 - protein, 1041 aa, unidentified
METNRENIYSRDEAGVNSLGSRPQMRPRSQTMERSIVEAGCDQNEFGCDLCDRRFRTTRGLGQHFRHSHPREHNDRLNTDRIKARWSPEEEYLLALEEVRATSRGIRFLNQHLAEAFPNRTIEAIKCHRRQRTYKELVANLLVRASSARESQTSYAGRLGETSSSVSAELVVEVNRLIDYLAIHPVRKYFSDELVAAAHAAIIGDVECDELILSWLQKAFRIRHGLRPSTSTAAGNPGSYRSGSDRPLSNRKRRRQDYARVQRLWNKSVKKAARGILEGSDEANSGESVHPTPERMLRYWSDIFKQEGPIIPDRTNQSPRNEELKDMWEPITIDEVKLARLDPGSAAGIDRISVQQFQRCPVHVRVLLFNVLLLVGHLPGRMSCARTVFLPKVEGSSDPKDYRPISITSVITRQFHKILAARLTSMHAWDERQAGFLPVDGCGENLAILNELIRFSRVNRRELHLASLDISKAFDMVPRQAIINSVAQLGAPQNLVEYLKGLYANNQTTLEYGGSELYCRVKRGVRQGDPLSPLLFNLVMESALVRLDKKLSFSLYGVSVNGLAYADDVILVASTSGGLQKNTESFLGALREIGLDLNLAKCKSLSLKPSGRDKRCKVLSESQLSIGGTSVPQVDLVGFWRYLGIWFSGPRVVSPEQLSMGVYLERISKAPLKPQQRIRILVDYLLPKYTHGSVLGRYTRKTYKAMDAQIRSYVRKWLHLPLDTTLGYFYAPVMSGGLGIPNFEMTVPLMKVERNRKLLSSARGTIRAVMHGSPLIRDTERTASWLLTRLPALDIECYKGYWIKSLYESSDGRDNRAINGVRGSIGWSRKFSNKLTGRDFVHFHQIRINALDSKARTLRGRGVDVRCRAGCLDRETPYHIVQRCFRSHGGRVLRHDNSVQLLCSEMTRKGYNVAVERQLQTVEGMRKPDLIAVKDGRAAVIDMQVVSGGSMESSHREKVEKYQRIPGYTELVKEAFGVASVEYRAATISWRGIWFKPSYDSLTRLGVGERCLGSICCQVMRGSYLNFVRFKQSTQMVWSAV

SEQ ID NO: 33482 - protein, 1114 aa, unidentified
MMASTALSLMGRCNPDGCTRGKHVTAAPMDGPRGPSSLAGTFGWGLAIPAGEPCGRVCSPATVGFFPVAKKSNKENRPEASGLPLESERTGDNPTVRGSAGADPVGQDAPGWTCQFCERTFSTNRGLGVHKRRAHPVETNTDAAPMMVKRRWHGEEIDLLARTEARLLAERGQCSGGDLFGALPGFGRTLEAIKGQRRREPYRALVQAHLARFGSQPGPSSGGCSAEPDFRRASGAEEAVEERCAEDAAAYDPSAVGQMSPDAARVLSELLEGAGRRRACRAMRPKTAGRRNDLHDDRTASAHKTSRQKRRAEYARVQELYKKCRSRAAAEVIDGACGGVGHSLEEMETYWRPILERVSDAPGPTPEALHALGRAEWHGGNRDYTQLWKPISVEEIKASRFDWRTSPGPDGIRSGQWRAVPVHLKAEMFNAWMARGEIPEILRQCRTVFVPKVERPGGPGEYRPILIASIPLRHFHSILARRLLACCPPDARQRGFICADGTLENSAVLDAVLGDSRKKLRECHVAVLDFAKAFDTVSHEALVELLRLRGMPEQFCGYIAHLYDTASTTLAVNNEMSSPVKVGRGVRQGDPLSPILFNVVMDLILASLPERVGYRLEMELVSALAYADDLVLLAGSKVGMQESISAVDCVGKQMGLRLNCRKSAVLSMIPDGHRKKHHYLTERTFNIGGKPLRQVSCVERWRYLGVDFEASGCVTLEHSISSALNNISRAPLKPQQRLEILRAHLIPRFQHGFVLGNISDDRLRMLDVQIRKAVGQWLRLPADVPKAYYHAAVQDGGLAIPSVRATIPDLIVRRFGGLDSSPWSVARAAAKSDKIRKKLRWAWKQLRRFSRVDSTTQRPSVRLFWREHLHASVDGRELRESTRTPTSTKWIRERCAQITGRDFVQFVHTHINALPSRIRGSRGRRGGGESSLTCRAGCKVRETTAHILQQCHRTHGGRILRHNKIVSFVAKAMEENKWTVELEPRLRTSVGLRKPDIIASRDGVGVIVDVQVVSGQRSLDELHREKRNKYGNHGELVELVAGRLGLPKAECVRATSCTISWRGVWSLTSYKELRSIIGLREPTLQIVPILALRGSHMNWTRFNQMTSVMGGGVG

SEQ ID NO: 33483 - protein, 1067 aa, unidentified
MGVAFDDNNELYGRTSGLPQEPEASTLKPVSPTARSPPRSGRGEGEWTCPECSRAFRTKTGLGVHKRRAHPVTANAAAAPPQVKRRWLEEEGELLAQTEARLVRAGGSASTINQQLMRELPQLGRSLEAIKGYRRKEAYKSRVQACLADLAQPPSPSTPGEANLPIRSTPIAGTAESSTPEQPLVWAEPPSEVLPVSVSLQSPDLSEALDHVKIVEDLLASSEARMARGASDGKRRGRPRRKGQSPEETQIAFARLSARKRRRMEYARVQELYKTCRSRAAAEVIDGQTRGVSHSLSELEAYWRPVMEAVSDAPGLTPEVLGALQRSEQYGGSRDYSQLWTPFTSDEVKACRVDNRSGPGPEGILPGAWNTLSSATQAEIFNAWLMAGEVPEKLRGCRTVFVPKTETPAGPGEYRPISIASVPLRHMHSVLAKRLEACCPPDARQRGFICADGTLENSAVLDAVLGDCGKKLRECHVAVLDFAKAFDTVSHAALIDLLRKRGLPEGFCNYVARLYDTSETVLVANGARSGPARVGQGVRQGDPLSPLLFNMAMDVILAALPREVGYGLEGENVSALAYADDLVLLAGSKVGMQSSIDCVWRTGRMMGLFISHAKSAVLSMVPDGKRKKVHFLTDRTFKVGSRWLRQVSCVERWRYLGVDFKASGCVTLEHDVKVALNNITKAPLKPQQRLEILRVHLIPRFLHGFVLGIITDDRLRMLDVQIRRAVRTWLRLPKDVPVGYFHAATADGGLAIPSLRTCVPDLIKKRFGRLDSSRWPVARAAARSERIRRKLQWADKQLRKFTAENPKSGERTTAMYWREALHASVDGLELRECPRVPASTKWMRERSMQYTGRDFVQFVHTHINALPSRVRNTRGRRTGVASELNCRAGCMVRETTAHTIQQCHRTHGGRIKRHNCVADVVCSAMEDKGWTVVKEPKVRTALGLRKPDIIASRNGVGVIVDAQVVSGQRPLDELHREKRNKYGNHAELVEKVADILGLPCKESVHSTSCTLSWRGVWSLASYRELKRFVGLDEGVLAGVPSLVLRGSHINWTRFNRMTTVSTESGSE

SEQ ID NO: 33484 - protein, 1104 aa, unidentified
MGEWPWVSWSLTVLVEKWRPFTILQPYPMPGQLRVDVYLPRKTSYLMDKNIYENTTSPGGGPLCGEKTHRSDVIIPPPGFAPSTDTASNTLGENVDASATTSSANPLSQEPGWCESCSKLFKSQRGLRVHQRSKHPELYHSQNQPLPRSKARWSDEEMVIFAREEIANRKIRFINQHLHKVFPHRTLESIKGLRGKNVRYARIMADLEAEMTSQPEAATSLCTETSENLASSNVLPQTRGWAENLVENIDTAHLANLGPLSQFEPGKPSSSTKEAINTEYNDWISKWLPSGAAHRERRANPPSTKLNARATRRLQYSRIQNLYKLNRSACAQEVLSGAWKVQSGELNLKEVQPFWEKMFRKESAKDRRKPKPTGEVLWGLMEPLTIAEVGSTLKSTTPSAPGPDKLTLDGVKRIPIAELVSHYNLWLYAGYQPEGLREGITTLIPKIKGTRDPAKLRPITVSSFICRIFHRCLAQRMETSLPLGERQKAFRKVDGICHNIWSLRSLIHNSKDNLKELNITFLDVRKAFDSISHKSLGIAAARLGLPPPLITYISNLYPNCSTKLKVNGKISKPIEVRRGVRQGDPLSPLLFNAVMDWALSELDPRVGVQIGEQRINHLAFADDIILVSSTKIGMVSSINTLSRHLAKSGLEISAGKEGKSASMAIVVDGKKKMWTVDPLPRFKVNSQKIPALSITQQYKYLGINIDAQGARNDAARILTEGLAELSRAPLKPQQRLYLLRVHLLPKLQHGLVLSSCAKRALTYLDKSVRSAIRRWLTLPKDTPTAFYHAKACDGGLGITRLEHTIPILKRNRMMKLTLSEDPVIMELVKLTYFTNLLHKYSNVKLLNSWPVTDKDSLARAEASMLHTSVDGRGLSNCSDVPRQSDWVTNGASLLSGRDFIGAIKVRGNLLPTKVSAARGRQREITCDCCRRPESLGHILQTCPRTWGPRISRHDSLLKRVRNQACLKNWTPIIEPSIPTNIGLRRPDLVLAKGNIAFLVDATVVADNANMQLQHEAKVEKYNNSDIKEWIKVHCPGVDEVRVTSLTANWRGCLYGGSASFLTEDLGLPKAELSLLSAKINEKGYYLWCAHYRGTARLWNRPLRS

SEQ ID NO: 33485 - protein, 1247 aa, unidentified
MQCTSRLADAPRFARVGVEGEGVGASGNGTDAQLWYGCTGCDEAFSSLRGLRIHAAQKKHGNQDGLLRLPAGRPRKRRVGKSTTAGASDRVTTDPVPAPVPESPGLLPGLPGPSLPGCSDLPPGVLPGGWSASPGPLSWPPSLDAGPLPGPSRVSPGPSRPSPGKPTGPPSLDAGPLPGPSRVSPGPSRPSPGKPPGTPEPLPGSPGGRRGVSPGQPGSRTDPSSSAGAGHFVCPQCSRAFSSKIGMSQHQKHAHLEEYNAGINITRTKARWDPEETYLLARLEATLNPDHKNINQTLHAALPRGSCRTLESIKAHRKQAAYRDLVTSLRSARESSEAQHVPDRPLETPEPQTPANPQRDSKQAVIEALQSLIGRAPPGSFQGARLWDIARQATRGTNILPLLNSYLRDVFTLPTKPTRKKPAVRPARSRRKQKKQEYARTQDLFRKKQSDCARAVLDGPTSSSVPGTGAFLQTWREIMTGPSPALEAPPLPTRGEVDLFFPATAQEIQSAEIAVNSAAGPDGFSARLLKSVPALLLRVMVNLLLLVRRVPAALRDARTTFIPKVPDAVDPSQFRPITVASVLQRLLHRILAKRALEAIPLNFRQRAFQPVDGCAENIWLLSTALNEARTRRRPLHMASVDLTKAFDRVTTDAILRGARRAGLSGEFIGYLKELYTTSRTLLQFQGESLLVEPTTGVRQGDPLSPILFNLVLDEYLSSLDPDISFVSGDLRLDAMAFADDLIVFASTPAGLQDRLDALVEFFDPRGLRVNVKKSFTLSLQPGRDKKVKVVCDQIFTIGGTPLPASKVATPWRYLGMTFTPQGSINKGTSEQLDLLLTRTSKAPLKPQQRLVVLRNYLLPRLYHRLVLGPWSAALLLKMDTTIRGAIRRWMDLPHDTPLGFFHAPVTEGGLGINSLRASIPAMVLQRLDGLHFSTHPGAEVAIQLPFLTGLHRRAEAAAQYQGQRLLSKADVHRMWSARLHGSCDGRPLRESKRVPAAHRWAAEGTRLLSGRDFISITKLKINALPTLERTSRGQHKDIQCRAGCQAVESLGHVLQACHRGHRGRIRRHDNIARYVCGRLTQIGWAVKWEPHYSVAGRTLKPDIVAHRGAETVVLDAQVVGTSMRLGFHHAQKKEKYSLPDLLHQVCEGRRDAARVSTITLNFRGVWAPESAQDLKSLGLTDNDLKLLTVRCLQGGAQCFRLHRRMTTVVKATGDEANALPAHSGLPPTQLGGRTLGPSAHNQSARTT

SEQ ID NO: 33486 - protein, 1085 aa, unidentified
MSNRLANTAAAGGVPEKTSGTLDIPGQPSSSGEKRAISYPGPFGCNSCSFTSTTWLSLELHFKSVHNIRDFVFLCSKCKKSWPSINSVASHYPRCKGSVKAAVVPTSLANTCTTCGSSFGTFSGLQLHRKRAHPDVFAASCSKKTKARWSNDEFTLLARLEAGLDPACKNINQVLAERLMEYNITRGVEMIKGQRRKDQYKALVRQLRSNSETQQCVGLAGSMDSNVPANDTSSSVASEVSITYPEYGAVMSCDLIKEATGMAIVDINELQSNLRKAFLSGRKLPMKFHGARETAQKKMANPRVAKFKRFQRLFRSNRRKLASHIFDKASLEQFGGSIDEASDHLEKFLSRPRLESDSYSVISGDKSIGVAHPILAEEVELELKASRPTAVGPDGIALEDIKKLNTYDIASLFNLWLKAGDLPASVKASRTIFLPKSDGTTDISNCRPITIASAMYRLFSRIITRRLAARLELNVRQKAFRPEMNGVFENSAILYALIKDAKVRSREICVTTLDLAKAFDTVPHSRILRALRKNNVDPESVDLISKMLTGTTYAEIKGLQGKLIPIRNGVRQGDPLSPLLFSLFIDEIIGRLQACGPAYDFHGEKICILAFADDLTLVADSAAGMKILLKAACDFLEESGMSLNAEKCRTLCITRSPRSRKTFVNPAAKFIISDWKTGISSEIPSLCATDTFRFLGHTFDGEGKIHIDTEEIRSMLKSVKSAPLKPEQKVALIRSHLLPRLQFLFSTAEADSRKAWLIDSIIRGCVKEILHSVKAGMCTDIFYIPSRDGGMGFTSLGEFSLFSRQKALAKMAGSSDPLSKRVAEFFIERWNIARDPKVIEAARRVYQKKRYQRFFQTYQSGGWNEFSGNTIGNAWLTNGRARGRNFIMAVKFRSNTAATRAENLRGRPGTKECRFCKSATETLAHICQRCPANHGLVIQRHDAVVTFLGEVARKEGYQVMIEPKVSTPVGALKPDLLLIKADTAFIVDVGIAWEGGRPLKLVNKMKCDKYKTAIPAILETFHVGHAETYGVILGSRGCWLKSNDKALASIGLNITRKMKEHLSWLTFEIIFITQISRIYNSFMKK

SEQ ID NO: 33487 - protein, 1390 aa, unidentified
MASCPKPGPPVSAGAMSLESGLTTHSVLAIERGPNSLANSGSDFGGGGLGLPLRLLRVSVGTQTSRSDWVDLVSWSHPGPTSKSQQVDLVSLFPKHRVDLLSKNDQVDLVAQFLPSKFPPNLAENDLALLVNLEFYRSDLHVYECVHFAAHWEGLSGLPEVYEQLAPQPCVGETLHSSLPRDSELFVPEEGSSEKESEDAPKTSPPTPGKHGLEQTGEEKVMVTVPDKNPPCPCCGTRVNSVLNLIEHLKVSHGKRGVCFRCAKCGKENSNYHSVVCHFPKCRGPETEKAPAGEWICEVCNRDFTTKIGLGQHKRLAHPAVRNQERIVASQPKETSNRGAHKRCWTKEEEELLIRLEAQFEGNKNINKLIAEHITTKTAKQISDKRRLLSRKPAEEPREEPGTCHHTRRAAASLRTEPEMSHHAQAEDRDNGPGRRPLPGRAAAGGRTMDEIRRHPDKGNGQQRPTKQKSEEQLQAYYKKTLEERLSAGALNTFPRAFKQVMEGRDIKLVINQTAQDCFGCLESISQIRTATRDKKDTVTREKHPKKPFQKWMKDRAIKKGNYLRFQRLFYLDRGKLAKIILDDIECLSCDIPLSEIYSVFKTRWETTGSFKSLGDFKTYGKADNTAFRELITAKEIEKNVQEMSKGSAPGPDGITLGDVVKMDPEFSRTMEIFNLWLTTGKIPDMVRGCRTVLIPKSSKPDRLKDINNWRPITIGSILLRLFSRIVTARLSKACPLNPRQRGFIRAAGCSENLKLLQTIIWSAKREHRPLGVVFVDIAKAFDTVSHQHIIHALQQREVDPHIVGLVSNMYENISTYITTKRNTHTDKIQIRVGVKQGDPMSPLLFNLAMDPLLCKLEESGKGYHRGQSSITAMAFADDLVLLSDSWENMNTNISILETFCNLTGLKTQGQKCHGFYIKPTKDSYTINDCAAWTINGTPLNMIDPGESEKYLGLQFDPWIGIARSGLSTKLDFWLQRIDQAPLKPLQKTDILKTYTIPRLIYIADHSEVKTALLETLDQKIRTAVKEWLHLPPCTCDAILYSSTRDGGLGITKLAGLIPSVQARRLHRIAQSSDDTMKCFMEKEKMEQLHKKLWIQAGGDRENIPSIWEAPPSSEPPNNVSTNSEWEAPTQKDKFPKPCNWRKNEFKKWTKLASQGRGIVNFERDKISNHWIQYYRRIPHRKLLTALQLRANVYPTREFLARGRQDQYIKACRHCDADIESCAHIIGNCPVTQDARIKRHNYICELLLEEAKKKDWVVFKEPHIRDSNKELYKPDLIFVKDARALVVDVTVRYEAAKSSLEEAAAEKVRKYKHLETEVRHLTNAKDVTFVGFPLGARGKWHQDNFKLLTELGLSKSRQVKMAETFSTVALFSSVDIVHMFASRARKSMVM

SEQ ID NO: 33488 - protein, 1327 aa, unidentified
MLAPRSDRGNGFGDGPATHPVPVNEIGQEPIDPDPFLGGENCGLPLRLFGVSVGTQTSQEDLTPIPTKLAVNELDVLVNFSFEVYRSDLKGYVGGVHFPVNLEVLEGFPEVYEHLEPQPCQGDNLDPSPPDDGVQVVLGREEGKKEREGAPEALPPVQRGHSEQVPDDIVKVTVPDKNPPCPCCSTRLNSVLALIDHLKGSHGKRRVCFRCAKCGRENFNHHSTVCHFAKCKGPSEEKPPVGEWICEVCGRDFTTKIGLGQHKRLAHPMVRNQERIDASQPKETSNRGAHKKCWTKEEEELLARLEVQFEGHKNINKLIAEHITTKTNKQISDKRRQMTRKDKGEGGAAGKLGPDTGRGNHSQAKVGNNGLGGNQLPGGPAATKDKAGCHLDKEEGNRIAISQQKKGRLQGRYHKEIKRRLEEGVINTFTKAFKQLLECQEVQPLINKTAQDCFGLLESACHIRTALRGKNKKETQEKPTGGQCLKWMKKRAVKKGNYLRFQRLFHLDRGKLARIILDDIECLSCDIAPSEIYSVFKARWETPGQFAGLGNFKSTGKADNKAFSDLITAKEIKKNVQEMSKGSAPGPDGIAIGDIKGMDPGYSRTAELFNLWLTSGEIPDMVRGCRTVLIPKSTQPERLKDINNWRPITIGSILLRLFSRIITARMTKACPLNPRQRGFIRAAGCSENLKLLQTIIRTAKSEHRPLGVVFVDIAKAFDTVSHQHILHVLQQRGVDPHIIGLVSNMYKDISTFVTTKKDTHTDKIQIRVGVKQGDPLSPLLFNLAMDPLLCKLEESGNGFHRGGHTITAMAFADDLVLLSDSWENMEKNIEILEAFCDLTGLKTQGQKCHGFYIKPTKDSYTVNNCAAWTIYGTPLNMINPGDSEKYLGLQIDPWTGIARSNISSKLDSWLERINQAPLKPLQKLDILKTYTIPRLTYMVDHSEMKAGALEALDLQIRSAVKDWLHLPSCTCDAILYVSTKDGGLGVTKLAGLIPSIQARRLHRIAQSPDETMKAFLDKEQMEKQYAKLWVQAGGKREKIPSIWDALPTPVLLTTSDTLSEWEAPNPKSKYPRPCNWRRKEFEKWTKLQCQGRGIQNFKGDVISNNWIQNYRRIPHRKLLTAVQLRANVYPTREFLGRGRGDDCVKFCRHCEVDLETCGHIISYCPVTKEARIKRHNRICERLIEEAEKKDWVVFKEPHIRDAVKELFKPDLIFVKEDRALVVDVTVRFEATTTSLEEAAIEKVDKYKRLETEVRSLTNAKDVLFMGFPLGARGKWYQGNFKLLDMLGLSESRQVTVAKTLSTDALISSVDIVHMFASKARKMNLVTV

SEQ ID NO: 33489 - protein, 1193 aa, unidentified
MESTAKGKSYWMARRPVEGATEGSLGRVPFVTRDPKRKPEAKRTLTHGLGLRECSVVLTRLIEGRRGRDHTPSGWNAQRGMPNDESSVEEPNGPIPSNPIPTGTQALPEPMADGEQGEHPGVVVTLPLRDLNCPLCGGSASTAVKVQRHLAFRHGTVPVRFSCESCGKTSPGCHSVLCHIPKCRGPTGEPPEKVVKCEGCSRTFGTRRACSIHEMHVHSEIRNRKRIAQDRQEKGTSTDGEGRAGVERADAGEGPSGEGIPPKRPRRARTPREPSEPPANPPILSPQPDLPPGGLRDLLREVASGWVRAARDGGTVIDSVLAAWLDGNDRLPELVDAATQRTLQGLPAGRLARRPATFVAPNRRRGRWGRRLKLLAKRRAYHDCQIRFRKDPARLAANILDGKSETSCPINEQAIHEHFRNKWANPSPFGGLGRFGTENRANNAHLLGPISKSEVQTSLRNASNASTPGPDGVGKRDISNWDPECETLTQLFNMWWFTGVIPSRLKKSRTVLLPKSSDPGAEMEIGNWRPITIGSMVLRLFTRVINTRLTEACPLHPRQRGFRRSPGCSENLEVLECLLRHSKEKRSQLAVVFVDFAQAFDTVSHEHMLSVLEQMNVDPHMVNLIREIYTNSCTSVELGRKEGPDIPVRVGVKQGDPLSPLLFNLALDPLIQSLERTGKGCEAEGHKVTALAFADDLALVAGSWEGMAHNLALVDEFCLTTGLTVQPKKCHSFMVRPCRGAFTVNDCPPWVLGGKALQLTNIENSIKYLGVKVNPWAGIEKPDLTVALDRWCKRIGKSLLKPSQKVYILNQFAIPRLFYLADHGGAGDVMLQNLDGTIRKAVKKWLHLPPSTCNGLLYARNCNGGLGICKLTRHIPSMQARRMFRLANSSDPLMKAMMRGSRVEQKFKKAWMRAGGEESALPRVFGANQYQEGEEVANDLVPRCPMPSDWRLEEFQHWMGLPIQGVGIAGFFRNRVANGWLRKPAGFKERHYIAALQLRACVYPTLEFQQRGRSKAGAACRRCSSRLESSSHILGKCPAVQGARIRRHNKICDLLKAEAETRGWEVRREWAFRTPAGELRRLDLVLILGDEALVIDVTVRYEFAPDTLQNAGKDKVSYYGPHKEAIARELGVRRVDIHGFPLGARGLWLASNSKVLELMGLSRERVKVFSRLLSRRVLLYSIDIMRTFYATLQ

SEQ ID NO: 33490 - protein, 1276 aa, unidentified
MGTDTVYVGQDYPSGLSKRVPARLVAGPMLRERSCHAHVFRAGHMWNWRTSLPSGRWDQPALEKSRVLTRSVATATDPEITSYPGKSVSTSTQVQEEDWCSRESGWISPGLAPEEPSVVSEITASMVATMRVATEEVVLEPQPEQVVTILPEHGRNVPPGLAEQDTASPIEVSVLLPDLAENCPLCGVPSGGLRLLGKHFAVRHAGVPVTYECRKCAWRSPNSHSISCHVPKCRGRARMPSGDPGIACDLCEARFATEVGVAQHKRHVHPVEWNKVRLERRGARGGGIKATKLWSVAEVETLIRLIREHGDSGATYQLIADELGRGKTAEQVRSKKRLLRIDTASNSPDDAEVEEERLESLAVRSSSRSPPSLVATRVREAVARGESEGGEEIRAIAALIRDVDQNPCLIETSASDIISKLGRRVDGPKRPRPVVREQTQEKGWVRRLARRKREYREAQYLYSRDQARLAAQILDGAASQECALPVDQVYGAFREKWETVGQFHGLGEFRTGARADNWEFYSPILAAEVKENLMRMANGTAPGPDRISKKALLDWDPRGEQLARLYTTWLIGGVIPRVFKECRTKLLPKSSDPVELQDIGGWRPVTIGSMVTRLFSRILTMRLTRACPINPRQRGFLASSSGCAENLLIFDEIVRRSRRDGGPLAVVFVDFARAFDSISHEHILCVLEEGGLDRHVIGLIRNSYVDCVTRVGCVEGMTPPIQMKVGVKQGDPMSPLLFNLAMDPLIHKLETAGTGLKWGDLSIATLAFADDLVLVSDSEEGMGRSLGILEKFCQLTGLRVQPRKCHGFFMDKGVVNGCGTWEICGSPIHMIPPGESVRYLGVQVGPGRGVMEPDLIPTVHTWIERISEAPLKPSQRMRVLNSFALPRIIYQADLGKVTVTKLAQIDGIVRKAVKKWLHLSPSTCNGLLYSRNRDGGLGLLKLERLIPSVRTKRIYRMSRSPDIWTRRMTSHSVSKSDWEMLWVQAGGERGSAPVMGAVEAAPTDVERSPDYPDWRREENLAWSALRVQGVGADQFRGDRTSSSWIAEPASVGFAQRHWLAALALRAGVYPTREFLARGKEKSGAACRRCPARLESCSHILGQCPFVQANRIARHNKVCVLLATEAERFGWTVIREFRLEDAAGGLKIPDLVCKKADTVLIVDVTVRYEMDGETLKRAASEKVKHYLPVGQQITDKVGGRCFKVMGFPVGARGKWPASNNTVLAELGVPAGRMRTFARLVSRRTLLYSLDILRDFMREPAGRGTRVALIPAATGAAN

SEQ ID NO: 33491 - DNA, 251 bp, synthetic construct
  source 1..251: mol_type = other DNA
ttcaagcctggcgcagccagtgactcctaggaatagactaggtggcaaccaagaatagtttggtcgactactggagagacagttgacggcacggaaagacggcacttgggacagtatgggttagcaccccagcctgtgtctttcgtgagagagaacccaaacaagctacggaaagccccacagagatatacccccaggagatcccgagagggggggaggatgagatctccaatcggacggatcaaaggtta

SEQ ID NO: 33492 - DNA, 57 bp, synthetic construct
  source 1..57: mol_type = other DNA
tgccgactgggcagctttggagaaatcctaagctggctaagagttcagcaactcctg

SEQ ID NO: 33493 - DNA, 225 bp, synthetic construct
  source 1..225: mol_type = other DNA
aactatgacgtatgttatagggagttttattagttaaggttgggtgcgtggagtcggatcgttgaagtcttcattgacctaaatgtatcgttgaccatcgtagcccttcaagtgtccatctgacgccccctcatggcgaccgctggggattgctttcgagcatgagctaagagcagtggatgcgggggtggtacaggcgtatcacccttaaaaagaaagtcgatc

SEQ ID NO: 33494 - DNA, 595 bp, synthetic construct
  source 1..595: mol_type = other DNA
gggcgatacgcataattttaatttcccgattgaaatccagtcgtcttaatctggtgaccagtggcgcggtcaccagtatagtgcacaggacgtgaatggctccgaggctggcggagtcactcactataagtgtgagagacgatgtcctgtgccaagtatacgtccaaccctaacgggttaagtgaaattagttgctcataacagggacggtgtacctgtttgctcgtggctggctatcgaatggacgggaccaatacacccccctgttagtaatggggtaagagagagcggtctgaaactatggccgaaatcacgacgccccactcctacccataacctgcacgtggtaccgccgcacattgaccgatacgggaggaggggcagcacttgaatcacgtagtcttggtgtagccattgcgggactacagccctcgtaagtgccgccttagaacgcaacggggcaataggtgggccggggcgctagcgggggggagtaatctcccctgttggcgtgcaccgcactgctcccactgggggcagtgtcatccggaaacaggtgggccggggcgccaccaggggggagcaatccctcctg

SEQ ID NO: 33495 - DNA, 882 bp, synthetic construct
  source 1..882: mol_type = other DNA
atcttgttgctcacgtctggggatgtgtaccctctttgctgccgctatcagttaattgggaaagagctgttcacagacgtcaatgtcctagcgatacgactaaatgggggttgatgtcgctaggaaactcctatccttggcctgcccgtggcgccgctgcttcgcgaacaagggggggggggggcaatcactaatatatggactggatagcaaggacagtccgttaaaagcatctcatggtggtagaccctaatacaagttgaggtgtcgcgcatacctccccgacttgaccagaagacgcgagtctgatggtcctaggggtacggtgagcctggagaccttggtcacgaaatcggatcaaggtgcgcaaacacgcgaaaggtgcatatccaggacaggctctgggggaaggtctcagagaagccccgatgggagtccttgggctccaaatctagcagctcgcatggctggggcgtacacgagagctgtgggtgaacctgtggatagggctagccaccctaccacaataggtattaaggtgttgctttcgatgataataatgagttgtatggtcgaacctccggcctcccacaggagccggaggcgtcgacccttaaacctgtaagtccgactgctcgatctccgcctcggtcggggcggggggaaggcgagtggacctgtccggaatgtagcagggcattccggaccaaaacagggttgggcgtgcacaagcggcgcgcacaccctgtgacggcaaacgccgcagccgccccaccgcaggtgaagcggagatggcttgaagaagagggtgagcttcttgcgcagacggaggcgcgtctggttagagccggaggcagtgccagtacaattaaccagcaatta

SEQ ID NO: 33496 - DNA, 286 bp, synthetic construct
  source 1..286: mol_type = other DNA
cgacggtgaaccaccttgtcgcggtgtaagagctttagtgtctcgaacaagaaatagcttgtgtgctgtccttctgggcggtgcacatacttcttaacctcccgaggccatgccggcgggggctttagcccccggcaggttttaccatgccggacgggttcgagaggtagaggccaaactaagagttcaccagcagacttcgcacgcggctggccactggccgaagtttaaacaacagggccgcatcttcccaaactcaatatatggtgttaagtgaaccgtgccg

SEQ ID NO: 33497 - DNA, 247 bp, synthetic construct
  source 1..247: mol_type = other DNA
gttccaaaggaaggcactcctttggttcgtgatgagatgttcatggtgcttgcctagctggagaaatccgactcacacctgcacgtggtccctgccgcctgccagtatgccgaggaaacgggtgcaacttaatccgtggatactggtagcaacgtgagcaacggtacggtccttcgcggaccaccctgggcgttcgggttgccagcccgttcgcccgaaatatcttggccctgaaactaaaagaaaa

SEQ ID NO: 33498 - DNA, 131 bp, synthetic construct
  source 1..131: mol_type = other DNA
ctcctgactaacctgatttcgtccgtgcggcggcgttttcttttcgctctccgctcgtcgaaatttgctgtagttgattcgcttttctttgcgttttcttctactttcgcagttttttctgcattgccacg

SEQ ID NO: 33499 - DNA, 152 bp, synthetic construct
  source 1..152: mol_type = other DNA
aatcccccctacccaatccccccgtcgtgacctccaggccaggaatcacgagcgtacgacagtggccatccggcaatgacaatagcgtgactaacgacaatgagtcagatccatgacccttggagtgggttaacctccgcctctttaaaaac

SEQ ID NO: 33500 - DNA, 265 bp, synthetic construct
  source 1..265: mol_type = other DNA
cgcacaggggacacagagcctgcccaagtaccgctcccgagggagcgggaaacgggggggtgactatcccctggggtccggcgagagcgctggtctacggaccaggggtggctgtgggcaggctgctcctcaggccagttgattagttacgcatgggctgtacctccacgtggtcccgctggtaacgacttgtcggctaaatcagcccgcccaccatctgggatatggttgaccgtctaaccccagtactcaggtcacaaacaaa

SEQ ID NO: 33501 - DNA, 127 bp, synthetic construct
  source 1..127: mol_type = other DNA
tgatcaaccccggctgggtcacctgggtgagagtgtatgatgttgagagacccgaaacactcaatgatcccaggatacatcactgatgatgtgtcccaaatgcatccatgagatgtttcttgcataa

SEQ ID NO: 33502 - DNA, 136 bp, synthetic construct
  source 1..136: mol_type = other DNA
ggatctgcaatttaccattggttcaactccgtgtgacgggcacatcgtgccccgatgtgtgagcctggactgtggtagcacttcggtgcacttgaagagcaatgtcagttgtccgtgtattcttcattcttcgaac

SEQ ID NO: 33503 - DNA, 338 bp, synthetic construct
  source 1..338: mol_type = other DNA
cctacggcgaagtttgcggcgttaccattctgggtgctaagactgaacaaggcattgatgggttccattgtctaaggttgcttttatattgaggtgtgccgtcgagcacctggtagcattcattcttatgggcgaaagaatgataaatatgatgatcgcgagatcatgatccactttcttggcgtaatgtggaaagtctagcatggtaatggggtaaagttgggtctctgatccaggctatacctatgatgagaaaccctagttcacttgctcaattctatttgtcgtaagacttatggaaataagtgacaaaacgatctagactatttctgagggta

SEQ ID NO: 33504 - DNA, 245 bp, synthetic construct
  source 1..245: mol_type = other DNA
gccttgcacagtagtccagcggtaagggtgtagatcaggcccgtctgtttcttccccggagctcgctcccttggcttcccttatatttaacatcagaaacagacattaaacatctactgatccaatttcgccggcgtacggccacgatcgggagggtgggaatctcggggatcttccgatcctaatccatgatgattacgacctgagtcactaaagacgatggcatgatgatccggcgatgaaaa

SEQ ID NO: 33505 - DNA, 213 bp, synthetic construct
  source 1..213: mol_type = other DNA
tcggattcctgtgtcgcgggccgccgccgggcccaggggtcgaagctcccacctttggcttcacctggttaatttttgtaccaacttcgacctcgccagagatcccaccggcgtaatttcgacagttaggtgacggtaggggacgtgggagtcctgtcacaacaatctgtgatgattatattacgttcactaagacgatggcactgttcgagc

SEQ ID NO: 33506 - DNA, 122 bp, synthetic construct
  source 1..122: mol_type = other DNA
tgacagtaatatgaaaacatcacatctgaccggcacagaatcaccatgccgtaatgcacccaactaaggattccaatgggtaaaaaaaaaaaaaaaaaaaaaaaaaaaaaaaaaaaaaaaaa

SEQ ID NO: 33507 - DNA, 437 bp, synthetic construct
  source 1..437: mol_type = other DNA
tagtgtgacggagtcctcaagcccccacaagtgcctgccaggtggcaggaaagggcaactactggtgagcgacccaagcaaggcggagccaagaccaagctggagccaagagcaactccaggaggcaggggtggatatcaagagcaaccccaagggacacagaccacgggcaactactggtgagcgcccaagacaggggtggatattaagaacagccccacaaagtgttacctatattaacaataaagttgaagcctcaaccacgcattgcgggttagatggcgtggcttggcccgccgccatgatgagctggaaccctccacctggtgggccgcacgagaccaccggctctttctactaaggccggtctccgtgactgcggttgggataaactccaagcactgagcggtaaaaaaaaaaaaaaaaaaaaaaaaaaa

SEQ ID NO: 33508 - DNA, 304 bp, synthetic construct
  source 1..304: mol_type = other DNA
tgaggtttttgttttcttttttccttttaccattcttgttccattgttgttatttgctttaatcctgtattttaccgccggcaattccattgttattattactgttactgttattattgttactattgtttttacttttacttactactgttattatactttaattcgttaacttacgttattgttaccactacttactttgctctctcgcaaacgttcgttgttgtttcttttggaccaggtttagagaaatcgcacgcacagcggaactggaccgcttaagccagaaatagtaaagtaacaa

SEQ ID NO: 33509 - DNA, 325 bp, synthetic construct
  source 1..325: mol_type = other DNA
ttcaggttatttagatgcttagtttttgtacctttcttgttttgtttaggattttgatagtgttagtatttttatatttttgtacgattgcataatgttcttttttatacagttctgttttaataaaatagacgatagctagagacgttagggcagccacaagccagttaggtagcggatagtaggtaggaacagacttttactatttcataacgcgtcaattaccacctgatttggaccaattcacgggatttgtccaaggtggacgggccacctttacttaacccggaaaaggaacatatataatttatgtgtgttcgataaa

SEQ ID NO: 33510 - DNA, 350 bp, synthetic construct
  source 1..350: mol_type = other DNA
tgactgtttagagtaggattttttatttgatattatgtatgttttataccttgtactttgttcatttatattgtattggggggattttttgtagcatgggattgtttttattgtatgacctttttgatatttttaataaactagacggtagctatgggggttagggcacgccacaagccagttagggcgctcatagtgagtagggacagtaattttaattcacaacgcgtcaattaccatctgattcggaccaatcttacctgacttgtactaagttaccggatttgtcccaggtggacgggccacctttacttaacccggaaaaggaacatgtattttatatatgtgtt

SEQ ID NO: 33511 - DNA, 1449 bp, synthetic construct
  source 1..1449: mol_type = other DNA
aaatcccagcgggatacagcaagaaggtatcggatctaataaggttgagcgaggagagggtggagatcctttggggggggtcgggctaagttcccctctcgggtcctcccacggtgacgctctacccctccctcctcgctcgtagaacccaacggtgaacacggttggcaggatgaagtgacgtgaggggtaagacatgcgtacgtgagcgcgcatttttgctgttctctggactgggtttcgtccccctcacaaccatcacttacactataggggcacagcggctcctacctccctccctatgacccccccttcccataccgatccatggctgttctagtctggaccgagggtcggacggggcatttgaaggtagctggaatcctccgctgctgcgagcctgaggtcgatggttagaggtgaaatacttgggaggagacacagcctccggagagcccctcccgggtggtcatcatggcaaccgggtgaaaccttacggtttcacttacgaaacagcaccataacagcgccgtaatagcgcaccggtgtgactactgtccagtgctgatattctcatctggagaatacaacacgggtaatggcagagtattcaaaacccaaatgtttacgatcgaccaacggagtcgttcccttgcatctaggccggacccgaaactgccgtaattgcccgtccccaaggtagcctcttagaaaaccgaagcccggtcggggcggtggttgcggcggcgctgcgggggcctgctgctcgggcggcgtcggtgtgccgcggtggttgcggtggtgcggcggggatctcggtccttgcggtgccgctgtgccgccgcggtcgcgtcggtggcgctggggtggtggcccgagtggcgtcggcgtgccactgcccatagtcgcccgcgggggcgaccgatctggaggggcgagggggctcgcgggactttaacgagaaacggaacgcaacttctcgcatcgctcccgggactttcccccctcgttcagccgagggatgccaaaaggcatgaaaggtaagtaccataccggtccgcaaaactctcttctgactcggttctctgttggttttctagagtaacaacgaggtggaggagagggacatggcagggactcccattcgtgccagcgggtggggacagatcgaaggaacggttcgagggcgtaacagacgagagggaatccggtcacacattgatgccatgcctaaataggcgaggtttgtatttctactttgtgggttcagtatagtcggagcatatggtcggttgtcccgttgttttcacggcgggcaagcgactatcatgataaagtagaatgggagacgggctccctgacaaacccggaaaggcgcccccccgtggttcgtagcagctgacggatcacgctcgaagaaaaatgagtgagaggggacgccgcaaccac

SEQ ID NO: 33512 - DNA, 108 bp, synthetic construct
  source 1..108: mol_type = other DNA
gggggacagctgggagtctcggcatgattacaaatcttgcgctgcactcggatgtcgtccccgtgacggacacattaatccggaaagcgagtggtgactcgcctcaag

SEQ ID NO: 33513 - DNA, 863 bp, synthetic construct
  source 1..863: mol_type = other DNA
atccttaatattcaatgaagcgcgggtaaacggcgggagtaactatgactctcttaaggtctagttacaactggtcctgagtcgtgctgcgtcgacaacggtagtgacgcgtattgcctggaggccgccaccatgcccgccatgaagatcgagtgccgcatcaccggcaccctgaacggcgtggagttcgagctggtgggcggcggagagggcacccccgagcagggccgcatgaccaacaagatgaagagcaccaaaggcgccctgaccttcagcccctacctgctgagccacgtgatgggctacggcttctaccacttcggcacctaccccagcggctacgagaaccccttcctgcacgccatcaacaacggcggctacaccaacacccgcatcgagaagtacgaggacggcggcgtgctgcacgtgagcttcagctaccgctacgaggccggccgcgtgatcggcgacttcaaggtggtgggcaccggcttccccgaggacagcgtgatcttcaccgacaagatcatccgcagcaacgccaccgtggagcacctgcaccccatgggcgataacgtgctggtgggcagcttcgcccgcaccttcagcctgcgcgacggcggctactacagcttcgtggtggacagccacatgcacttcaagagcgccatccaccccagcatcctgcagaacgggggccccatgttcgccttccgccgcgtggaggagctgcacagcaacaccgagctgggcatcgtggagtaccagcacgccttcaagacccccatcgccttcgccagatctcgagctcgagctcggcttcctgcgcgataaccaactctcagaggtggccaataagttcg

SEQ ID NO: 33514 - DNA, 863 bp, synthetic construct
  source 1..863: mol_type = other DNA
atccttaatattcaatgaagcgcgggtaaacggcgggagtaactatgactctcttaaggtctagttacaactggtcctgagtcgtgctgcgtcgacaacggtagtgacgcgtattgcctggaggccgccaccatgcccgccatgaagatcgagtgccgcatcaccggcaccctgaacggcgtggagttcgagctggtgggcggcggagagggcacccccgagcagggccgcatgaccaacaagatgaagagcaccaaaggcgccctgaccttcagcccctacctgctgagccacgtgatgggctacggcttctaccacttcggcacctaccccagcggctacgagaaccccttcctgcacgccatcaacaacggcggctacaccaacacccgcatcgagaagtacgaggacggcggcgtgctgcacgtgagcttcagctaccgctacgaggccggccgcgtgatcggcgacttcaaggtggtgggcaccggcttccccgaggacagcgtgatcttcaccgacaagatcatccgcagcaacgccaccgtggagcacctgcaccccatgggcgataacgtgctggtgggcagcttcgcccgcaccttcagcctgcgcgacggcggctactacagcttcgtggtggacagccacatgcacttcaagagcgccatccaccccagcatcctgcagaacgggggccccatgttcgccttccgccgcgtggaggagctgcacagcaacaccgagctgggcatcgtggagtaccagcacgccttcaagacccccatcgccttcgccagatctcgagctcgaccaaagcgacaggagctgtgagttccgggcttggggcggggaccgggctg

SEQ ID NO: 33515 - DNA, 863 bp, synthetic construct
  source 1..863: mol_type = other DNA
atccttaatattcaatgaagcgcgggtaaacggcgggagtaactatgactctcttaaggtctagttacaactggtcctgagtcgtgctgcgtcgacaacggtagtgacgcgtattgcctggaggccgccaccatgcccgccatgaagatcgagtgccgcatcaccggcaccctgaacggcgtggagttcgagctggtgggcggcggagagggcacccccgagcagggccgcatgaccaacaagatgaagagcaccaaaggcgccctgaccttcagcccctacctgctgagccacgtgatgggctacggcttctaccacttcggcacctaccccagcggctacgagaaccccttcctgcacgccatcaacaacggcggctacaccaacacccgcatcgagaagtacgaggacggcggcgtgctgcacgtgagcttcagctaccgctacgaggccggccgcgtgatcggcgacttcaaggtggtgggcaccggcttccccgaggacagcgtgatcttcaccgacaagatcatccgcagcaacgccaccgtggagcacctgcaccccatgggcgataacgtgctggtgggcagcttcgcccgcaccttcagcctgcgcgacggcggctactacagcttcgtggtggacagccacatgcacttcaagagcgccatccaccccagcatcctgcagaacgggggccccatgttcgccttccgccgcgtggaggagctgcacagcaacaccgagctgggcatcgtggagtaccagcacgccttcaagacccccatcgccttcgccagatctcgagctcgaagatgaccacaaggcttcaggccctgacgtgcttaggtttccaggtgggg

SEQ ID NO: 33516 - DNA, 165 bp, synthetic construct
  source 1..165: mol_type = other DNA
attcaatgaagcgcgggtaaacggcgggagtaactatgactctcttaaggtctagttacaactggtcctgagtcgtgctgcgtcgacaacggtagtgacgcgtattgcctggaggacggacgccggcattcgccgcgtggttcccagcgacctgtatcccctcgt

SEQ ID NO: 33517 - DNA, 165 bp, synthetic construct
  source 1..165: mol_type = other DNA
attcaatgaagcgcgggtaaacggcgggagtaactatgactctcttaaggtctagttacaactggtcctgagtcgtgctgcgtcgacaacggtagtgacgcgtattgcctggaggccggacgccggcattcgccgcgtggttcccagcgacctgtatcccctcgt

SEQ ID NO: 33518 - DNA, 165 bp, synthetic construct
  source 1..165: mol_type = other DNA
attcaatgaagcgcgggtaaacggcgggagtaactatgactctcttaaggtctagttacaactggtcctgagtcgtgctgcgtcgacaacggtagtgacgcgtattgcctggaggtcggacgccggcattcgccgcgtggttcccagcgacctgtatcccctcgt

SEQ ID NO: 33519 - DNA, 166 bp, synthetic construct
  source 1..166: mol_type = other DNA
attcaatgaagcgcgggtaaacggcgggagtaactatgactctcttaaggtctagttacaactggtcctgagtcgtgctgcgtcgacaacggtagtgacgcgtattgcctggaggagcggacgccggcattcgccgcgtggttcccagcgacctgtatcccctcgt

SEQ ID NO: 33520 - DNA, 175 bp, synthetic construct
  source 1..175: mol_type = other DNA
attcaatgaagcgcgggtaaacggcgggagtaactatgactctcttaaggtctagttacaactggtcctgagtcgtgctgcgtcgacaacggtagtgacgcgtattgcctggaggatgcccgccagcggacgccggcattcgccgcgtggttcccagcgacctgtatcccctcgt

SEQ ID NO: 33521 - DNA, 215 bp, synthetic construct
  source 1..215: mol_type = other DNA
attcaatgaagcgcgggtaaacggcgggagtaactatgactctcttaaggtctagttacaactggtcctgagtcgtgctgcgtcgacaacggtagtgacgcgtattgcctggaggatgcccgccatgaagatcgagtgccgcatcaccggcaccctgaacggcgtgcggacgccggcattcgccgcgtggttcccagcgacctgtatcccctcgt

SEQ ID NO: 33522 - DNA, 221 bp, synthetic construct
  source 1..221: mol_type = other DNA
attcaatgaagcgcgggtaaacggcgggagtaactatgactctcttaaggtctagttacaactggtcctgagtcgtgctgcgtcgacaacggtagtgacgcgtattgcctggaggatgcccgccatgaagatcgagtgccgcatcaccggcaccctgaacggcgtggagttcgagctggtgggcggcggagaggggcggacgccggcattcgccgcgtggt

SEQ ID NO: 33523 - DNA, 60 bp, synthetic construct
  source 1..60: mol_type = other DNA
cgggtaaacggcgggagtaactatgactctcaaaaggtagccaaatgcctcgtcatctaa

SEQ ID NO: 33524 - DNA, 60 bp, synthetic construct
  source 1..60: mol_type = other DNA
cgggtaaacggcgggagtaactatgactctcttttggtagccaaatgcctcgtcatctaa

SEQ ID NO: 33525 - DNA, 60 bp, synthetic construct
  source 1..60: mol_type = other DNA
cgggtaaacggcgggagtaactatgactctcttaacctagccaaatgcctcgtcatctaa

SEQ ID NO: 33526 - DNA, 60 bp, synthetic construct
  source 1..60: mol_type = other DNA
cgggtaaacggcgcctcatactatgactctcttaaggtagccaaatgcctcgtcatctaa

SEQ ID NO: 33527 - DNA, 60 bp, synthetic construct
  source 1..60: mol_type = other DNA
cgggtaaacggcgcctctaactatgactctcttaaggtagccaaatgcctcgtcatctaa

SEQ ID NO: 33528 - DNA, 60 bp, synthetic construct
  source 1..60: mol_type = other DNA
cgggtaaacggcgccagtaactatgactctcttaaggtagccaaatgcctcgtcatctaa

SEQ ID NO: 33529 - DNA, 60 bp, synthetic construct
  source 1..60: mol_type = other DNA
cgggtaaacggcgggagtaactatgactctcttaaggtagccaaatgcctcgtgttctaa

SEQ ID NO: 33530 - DNA, 60 bp, synthetic construct
  source 1..60: mol_type = other DNA
cgggtaaacggcgggagtaactaacactctcttaaggtagccaaatgcctcgtgttctaa

SEQ ID NO: 33531 - DNA, 60 bp, synthetic construct
  source 1..60: mol_type = other DNA
cgggttcacggcgggagtaactaacactctcttaaggtagccaaatgcctcgtgttctaa

SEQ ID NO: 33532 - DNA, 60 bp, synthetic construct
  source 1..60: mol_type = other DNA
cgggttcacggcgggagtaactatgactctcttaaggtagccaaatgcctcgtgttctaa

SEQ ID NO: 33533 - DNA, 60 bp, synthetic construct
  source 1..60: mol_type = other DNA
cgggttcacggcgggagtaactatgactctcttaaggtagccaaatgcctcgtcatctaa

SEQ ID NO: 33534 - DNA, 60 bp, synthetic construct
  source 1..60: mol_type = other DNA
cgggtaaacggcgggagtaactatgactctcttaaggtagccaaatgcctcgtcatctaa

SEQ ID NO: 33535 - DNA, 60 bp, synthetic construct
  source 1..60: mol_type = other DNA
cgggtaaacggcgggagtaagactctgactcttaaggtagccaaatgcctcgtcatctaa

SEQ ID NO: 33536 - DNA, 60 bp, synthetic construct
  source 1..60: mol_type = other DNA
cgggtaaacggcgggagtaagactgactctcttaaggtagccaaatgcctcgtcatctaa

SEQ ID NO: 33537 - DNA, 60 bp, synthetic construct
  source 1..60: mol_type = other DNA
cgggtaaacggcgggagtaactatctgactcttaaggtagccaaatgcctcgtcatctaa

SEQ ID NO: 33538 - DNA, 60 bp, synthetic construct
  source 1..60: mol_type = other DNA
cgttcgctgagcgggagtaactatgactctcttaaggtagccaaatgcctcgtcatctaa

SEQ ID NO: 33539 - DNA, 60 bp, synthetic construct
  source 1..60: mol_type = other DNA
cgttcgaacggcgggagtaactatgactctcttaaggtagccaaatgcctcgtcatctaa

SEQ ID NO: 33540 - DNA, 60 bp, synthetic construct
  source 1..60: mol_type = other DNA
cgggtactgagcgggagtaactatgactctcttaaggtagccaaatgcctcgtcatctaa

SEQ ID NO: 33541 - DNA, 60 bp, synthetic construct
  source 1..60: mol_type = other DNA
cgggtaaacggcgggagtaactatgactctcttaaggtagccaaatgcctgagtgcacaa

SEQ ID NO: 33542 - DNA, 60 bp, synthetic construct
  source 1..60: mol_type = other DNA
cgggtaaacggcgggagtaactatgactctcttaaggtagccaaatgcctgagtatctaa

SEQ ID NO: 33543 - DNA, 60 bp, synthetic construct
  source 1..60: mol_type = other DNA
cgggtaaacggcgggagtaactatgactctcttaaggtagccaaatgcctcgtcgcacaa

SEQ ID NO: 33544 - DNA, 60 bp, synthetic construct
  source 1..60: mol_type = other DNA
cgttcgctgagcgggagtaagactctgactcttaaggtagccaaatgcctgagtgcacaa

SEQ ID NO: 33545 - DNA, 60 bp, synthetic construct
  source 1..60: mol_type = other DNA
cgggtaaacggcgggagtaagactctgactcttaaggtagccaaatgcctgagtgcacaa

SEQ ID NO: 33546 - DNA, 60 bp, synthetic construct
  source 1..60: mol_type = other DNA
cgttcgctgagcgggagtaactatgactctcttaaggtagccaaatgcctgagtgcacaa

SEQ ID NO: 33547 - DNA, 24 bp, synthetic construct
  source 1..24: mol_type = other DNA
atctgtcagtaagccccatggaaa

SEQ ID NO: 33548 - protein, 21 aa, synthetic construct
SYKVKLITPDGPIEFDCPDDV

SEQ ID NO: 33549 - protein, 21 aa, synthetic construct
SYKVKLITPDGPIEFDCPDNV

SEQ ID NO: 33550 - protein, 21 aa, synthetic construct
SYKVKLITPEGPIEFECPDDV

SEQ ID NO: 33551 - protein, 21 aa, synthetic construct
SYKVKLITPDGPIEFECPDDV

SEQ ID NO: 33552 - protein, 19 aa, synthetic construct
AGKLKTGSLNQDDQSFLDD

SEQ ID NO: 33553 - protein, 19 aa, synthetic construct
AGKVVSGSVDQSDQSFLDD

SEQ ID NO: 33554 - protein, 19 aa, synthetic construct
AGKVVSGFVDQSDESFLDD

SEQ ID NO: 33555 - DNA, 137 bp, synthetic construct
  source 1..137: mol_type = other DNA
gtagtagtagtagtagtagtagtagtagtagtagtcggcgatgctgaaccacctcctcgtggtgccgactgggcagctttggagaaatcctaagctggctaagagttcagcaactcctgatggggctaaccactcca

SEQ ID NO: 33556 - protein, 6 aa, synthetic construct
MGLTTP

SEQ ID NO: 33557 - DNA, 48 bp, Homo sapiens
  source 1..48: mol_type = genomic DNA
gtaagggaagtcggcaagccggatccgtaacttcgggataaggattgg

SEQ ID NO: 33558 - DNA, 35 bp, unidentified
  source 1..35: mol_type = unassigned DNA
agtcggcaagccggatccgtaacttcgggatgccg

SEQ ID NO: 33559 - DNA, 35 bp, Homo sapiens
  source 1..35: mol_type = genomic DNA
agtcggcaagccggatccgtaacttcgggataagg

SEQ ID NO: 33560 - DNA, 41 bp, unidentified
  source 1..41: mol_type = unassigned DNA
agtcggcgatgctgaaccacctcctcgtggggaggataagg

SEQ ID NO: 33561 - DNA, 41 bp, unidentified
  source 1..41: mol_type = unassigned DNA
gggtaaacggcgggagtaactatgactctcttaagggtcta

SEQ ID NO: 33562 - DNA, 41 bp, Homo sapiens
  source 1..41: mol_type = genomic DNA
gggtaaacggcgggagtaactatgactctcttaaggtagcc

SEQ ID NO: 33563 - DNA, 18 bp, unidentified
  source 1..18: mol_type = unassigned DNA
atgactctcttaaggtag

SEQ ID NO: 33564 - DNA, 18 bp, synthetic construct
  source 1..18: mol_type = other DNA
atgactctcttaaggggt

SEQ ID NO: 33565 - DNA, 18 bp, synthetic construct
  source 1..18: mol_type = other DNA
atgactctcttaagggta

SEQ ID NO: 33566 - DNA, 41 bp, synthetic construct
  source 1..41: mol_type = other DNA
gtaactatgactctcttaagggtctagttacaactgggcat

SEQ ID NO: 33567 - DNA, 41 bp, synthetic construct
  source 1..41: mol_type = other DNA
gccggtggtgactaagctagctagccaaatgcctcgtcatc

SEQ ID NO: 33568 - DNA, 41 bp, synthetic construct
  source 1..41: mol_type = other DNA
aatttatgtgtgttcgataaatagccaaatgcctcgtcatc

SEQ ID NO: 33569 - DNA, 41 bp, synthetic construct
  source 1..41: mol_type = other DNA
gtaactatgactctcttaaggggatcctttaaggagaccaa

SEQ ID NO: 33570 - DNA, 18 bp, unidentified
  source 1..18: mol_type = unassigned DNA
atgactctcttaagggtc

SEQ ID NO: 33571 - DNA, 18 bp, synthetic construct
  source 1..18: mol_type = other DNA
atgactctcttaaggggg

SEQ ID NO: 33572 - DNA, 18 bp, synthetic construct
  source 1..18: mol_type = other DNA
atgactctcttaagggtg

SEQ ID NO: 33573 - DNA, 17 bp, synthetic construct
  source 1..17: mol_type = other DNA
atgactctcttaagtag

SEQ ID NO: 33574 - RNA, 175 nt, unidentified
  source 1..175: mol_type = unassigned RNA
gtctagttacaactgggcatcgctgcagagatcgcacctcctcgtggtcccgctggtagcccttcgaagggtgactaagtcgatctctgccccaggtacggagccgttgggactcaccagtccaacgtaactcctgcctaaattcggtgaaacaaattcctcggtaaaaagcccc

SEQ ID NO: 33575 - RNA, 15 nt, synthetic construct
  source 1..15: mol_type = other RNA
tctagttacaactgg

SEQ ID NO: 33576 - RNA, 65 nt, synthetic construct
  source 1..65: mol_type = other RNA
attcaatgaagcgcgggtaaacggcgggagtaactatgactctcttaaggtctagttacaactgg

SEQ ID NO: 33577 - DNA, 192 bp, unidentified
  source 1..192: mol_type = unassigned DNA
cgccttcgccagatctcgagctcgagcggacgccggcattcgccgcgtggttcccagcgacctgtatcccctcgtgctcggcttcctgcgcgataaccaactctcagaggtggccaataagttcgccaaagcgacaggagctgtgagttccgggcttggggcggggaccgggctgagatgaccacaaggctt

SEQ ID NO: 33578 - DNA, 192 bp, unidentified
  source 1..192: mol_type = unassigned DNA
cgccttcgccagatctcgagctcgagcggacgccggcattcgccgcgtggttcccagcgacctgtatcccctcgggctcggcttcctgcgcgataaccaactctcagaggtggccaataagctcgccaacgcgacaggacctgtgagttccgggcttgtggcgggggccgggctgagctgaccccaaggctt

SEQ ID NO: 33579 - DNA, 142 bp, synthetic construct
  source 1..142: mol_type = other DNA
cgccttcgccagatctcgagctcgagctcggcttcctgcgcgataaccaactctcagaggtggccaataagttcgccaaagcgacaggagctgtgagttccgggcttggggcggggaccgggctgagatgaccacaaggctt

SEQ ID NO: 33580 - DNA, 92 bp, synthetic construct
  source 1..92: mol_type = other DNA
cgccttcgccagatctcgagctcgagcaaagcgacaggagctgtgagttccgggcttggggcggggaccgggctgagatgaccacaaggctt

SEQ ID NO: 33581 - DNA, 44 bp, synthetic construct
  source 1..44: mol_type = other DNA
cgccttcgccagatctcgagctcgagcagatgaccacaaggctt

SEQ ID NO: 33582 - DNA, 18 bp, unidentified
  source 1..18: mol_type = unassigned DNA
atgactctcttaaggggg
